(19) United States
(12) Patent Application Publication
(10) Pub. No.: US 2008/0085284 A1
(43) Pub. Date: Apr. 10, 2008

(54) Construction of a Comparative Database and Identification of Virulence Factors Comparison of Polymorphic Regions in Clinical Isolates of Infectious Organisms

(76) Inventors: Villoo Morawala Patell, Bangalore (IN); K.R. Rajyashri, Bangalore (IN); Marc Rodrigue, Marcy (FR); Guy Vernet, Marcy (FR)

Correspondence Address: SALIWANCHIK LLOYD & SALIWANCHIK;A PROFESSIONAL ASSOCIATION, PO BOX 142950, GAINESVILLE, FL, 32614-2950, US

(21) Appl. No.: 11/632,108

(22) PCT Filed:
(86) PCT No.: PCT/IB04/02598

(51) Int. Cl. A61K 31/70; A61K 39/00; A61P 43/00; C07H 21/04; C12Q 1/68

(52) U.S. Cl. 424/184.1; 435/6; 514/44; 536/23.7; 536/24.33; 707/102

(57) ABSTRACT

The present invention is directed to novel nucleotide sequences to be used for diagnosis, identification of the strain, typing of the strain and giving orientation to its potential degree of virulence, infectivity and/or latency for all infectious diseases more particularly tuberculosis. The present invention also includes method for the identification and selection of polymorphisms associated with the virulence' and/or infectivity in infectious diseases more particularly in tuberculosis by a comparative genomic analysis of the sequences of different clinical isolates/strains of infectious organisms. The regions of polymorphisms, can also act as potential drug targets and vaccine targets. More particularly, the invention also relates to identifying virulence factors of M. tuberculosis strains and other infectious organisms to be included in a diagnostic DNA chip allowing identification of the strain, typing of the strain and finally giving orientation to its potential degree of virulence. Although the present invention has been illustrated with specific reference to the polymorphic region in the Mycobacterium tuberculosis, the said invention is not to be understood and construed as being limited to Tuberculosis but is applicable to all infectious diseases.

### FIELD OF INVENTION

[0001] The present invention is directed to novel nucleotide sequences to be used for diagnosis, identification of the strain, typing of the strain and giving orientation to its potential degree of virulence, infectivity and/or latency for all infectious diseases including tuberculosis. The present invention also includes method for the identification and selection of polymorphisms associated with the virulence and/or infectivity in infectious diseases by a comparative genomic analysis of the sequences of different clinical isolates/strains of infectious organisms. The regions of polymorphisms, can also act as potential drug targets and vaccine targets. More particularly, the invention also relates to identifying virulence factors of M. tuberculosis strains and other infectious organisms to be included in a diagnostic DNA chip allowing identification of the strain, typing of the strain and finally giving orientation to its potential degree of virulence.

[0002] Although the present invention has been illustrated with specific reference to the polymorphic region in the Mycobacterium tuberculosis, the said invention is not to be understood and construed as being limited to Tuberculosis but is applicable to all infectious diseases.

### BACKGROUND OF THE INVENTION

[0003] Microbial pathogens use a variety of complex strategies to subvert host cellular functions to ensure their multiplication and survival. Some pathogens that have co-evolved or have had a long-standing association with their hosts utilize finely tuned host-specific strategies to establish a pathogenic relationship.

[0004] During infection, pathogens encounter different conditions, and respond by expressing virulence factors that are appropriate for the particular environment, host, or both.

[0005] Although antibiotics have been effective tools in treating infectious disease, the emergence of drug resistant pathogens is becoming problematic in the clinical setting. New antibiotic or antipathogenic molecules are therefore needed to combat such drug resistant pathogens. Accordingly, there is a need in the art for screening methods aimed not only at identifying and characterizing potential antipathogenic agents, but also for identifying and characterizing the virulence factors that enable pathogens to infect and debilitate their hosts.

[0006] The mycobacteria are rod-shaped, acid-fast, aerobic bacilli that do not form spores. Several species of mycobacteria are pathogenic to humans and/or animals, and factors associated with their virulence. Tuberculosis is a worldwide health problem, which causes approximately 3 million deaths each year, yet little is known about the molecular basis of tuberculosis pathogenesis. The disease is caused by infection with Mycobacterium tuberculosis; tubercle bacilli are inhaled and then ingested by alveolar macrophages. As is the case with most pathogens, infection with M. tuberculosis does not always result in disease. The infection is often arrested by developing cell-mediated immunity (CMI) resulting in the formation of microscopic lesions, or tubercles, in the lung. If CMI does not limit the spread of M. tuberculosis, caseous necrosis, bronchial wall erosion, and pulmonary cavitations may occur. The factors that determine whether infection with M. tuberculosis results in disease are not well understood.

[0007] The tuberculosis complex is a group of four mycobacterial species that are so closely related genetically that it has been proposed treat they or combined into a single species. Three important members of the complex are Mycobacterium tuberculosis, the major cause of human tuberculosis; Mycobacterium africanum, a major cause of human tuberculosis in some populations; and Mycobacterium bovis, the cause of bovine tuberculosis. None of these mycobacteria is restricted to being pathogenic for a single host species. For example, M. bovis causes tuberculosis in a wide range of animals including humans in which it causes a disease that is clinically indistinguishable from that caused by M. tuberculosis. Human tuberculosis is a major cause of mortality throughout the world, particularly in less developed countries. It accounts for approximately eight million new cases of clinical disease and three million deaths each year. Bovine tuberculosis, as well as causing a small percentage of these human cases, is a major cause of animal suffering and large economic costs in the animal industries.

[0008] Antibiotic treatment of tuberculosis is very expensive and requires prolonged administration of a combination of several anti-tuberculosis drugs. Treatment with single antibiotics is not advisable as tuberculosis organisms can develop resistance to the therapeutic levels of all antibiotics that are effective against them. Strains of M. tuberculosis that are resistant to one or more anti-tuberculosis drugs are becoming more frequent and treatment of patients infected with such strains is expensive and difficult. In a small but increasing percentage of human tuberculosis cases the tuberculosis organisms have become resistant to the two most useful antibiotics, isoniazid and rifampicin. Treatment of these patients presents extreme difficulty and in practice is often unsuccessful. In the current situation there is clearly an urgent need to develop new methods for detecting virulent strains of mycobacteria and to develop tuberculosis therapies.

[0009] There is a recognized vaccine for tuberculosis, which is an attenuated form of M. bovis known as BCG. This is very widely used but it provides incomplete protection. The development of BCG was completed in 1921 but the reason for its avirulence was and has continued to remain unknown. Methods of attenuating tuberculosis strains to produce a vaccine in a more rational way have been investigated but have not been successful for a variety of reasons. However, in view of the evidence that dead M. bovis BCG was less effective in conferring immunity than live BCG, there exists a need for attenuated strains of mycobacteria that can be used in the preparation of vaccines.

[0010] A variety of compounds have been proposed as virulence factors for tuberculosis but, despite numerous investigations, good evidence to support these proposals is lacking. Nevertheless, the discovery of a virulence factor or factors for tuberculosis is very important and is an active area of current research. Such a discovery would not only enable the possible development of a new generation of tuberculosis vaccines but might also provide a target for the design or discovery of new or improved anti-tuberculosis drugs or therapies.

[0011] Present methods for the identification and characterization of mycobacteria in samples from human and animal diseases are by Zeil-Neilson staining, in-vitro and in vivo culture, biochemical testing and serological typing. These methods are generally slow and do not readily discriminate between closely related mycobacterial strains and species particularly, for example,Mycobacterium paratuberculosis and Mycobacterium avium. Mycobacteria are widespread in the environment, and rapid methods do not exist for the identification of specific pathogenic strains from amongst the many environmental strains, which are generally non-pathogenic. Difficulties with existing methods of mycobacterial identification and characterization have increased relevance for the analysis of microbial isolates from Crohn's disease (Regional Ileitis) in humans and Johne's disease in animals (particularly cattle, sheep and goats) as well as for M. avium strains from AIDS patients with mycobacterial superinfections. Although recognition of the causative agents of human leprosy and tuberculosis are clear, clinico-pathological forms of each disease exist, such as the tuberculoid form of leprosy, in which mycobacterial tissue abundance is low and identification correspondingly difficult. Improvements in the specific recognition and characterization of mycobacteria may also increase in relevance if current evidence linking diseases such as rheumatoid arthritis to mycobacterial antigens is substantiated. Emerging drug resistance to mycobacteria including M. avium isolates from AIDS patients, any Mycobacterium tuberculosis from TB patients is an increasing problem.

[0012] There is no data or technical information in the prior art, which permits to select specifically potential new targets and protective antigens for new drugs and vaccine compositions to treat and prevent infectious diseases, particularly tuberculosis. Furthermore, there is a need for the development of new tools for the selection of genes which encode for essential proteins or regulatory nucleotidic sequences in the survival or infection of mycobacterium species and useful for the design of anti-tuberculosis drugs and vaccines based on the knowledge of comparative mycobacterial genomics.

[0013] A method of using DNA probes for the precise identification of mycobacteria and discrimination between closely related mycobacterial strains and species by genotype characterization is essential. The method of genotypic analysis is further applicable to the rapid identification of phenotypic properties such as drug resistance and pathogenicity.

[0014] The invention aids in fulfilling these needs in the art. The method according to the invention has the advantage to reduce drastically the number of potential new targets and protective antigens by giving for the first time an exhaustive description of conserved SNPs in the tuberculosis. The isolated polynucleotides described in the present invention, which are highly conserved in genomic sequences of both virulent and avirulent, are by this characteristic essential for the survival or the virulence of these mycobacteria in the host. The identification of antigens and potentially therapeutic targets has been made by a method of comparative genomic analysis.

### PRIOR ART

[0015] Patent application WO 02074903 describes a method of selection of purified nucleotidic sequences or polynucleotides encoding proteins or part of proteins carrying at least an essential function for the survival or the virulence of mycobacterium species by a comparative genomic analysis of the sequence of the genome of M. tuberculosis aligned on the genome sequence of M. leprae and M. tuberculosis and M. leprae marker polypeptides of nucleotides encoding the polypeptides, and methods for using the nucleotides and the encoded polypeptides are disclosed.

[0016] U.S. Pat. No. 6,228,575 provides oligonucleotide based arrays and methods for speciating and phenotyping organisms, for example, using oligonucleotide sequences based on the Mycobacterium tuberculosis, rpoB gene. The groups or species to which an organism belongs may be determined by comparing hybridization patterns of target nucleic acid from the organism to hybridization patterns in a database.

[0017] Patent application No. WO9954487 and U.S. Pat. No. 6,492,506 describes a method for isolating a polynucleotide of interest that is present or is expressed in a genome of a first mycobacterium strain and that is absent or altered in a genome of a second mycobacterium strain which is different from the first mycobacterium strain using a bacterial artificial chromosome (BAC) vector. This invention further relates to a polynucleotide isolated by this method and recombinant BAC vector used in this methQd. In addition the present invention comprises method and kit for detecting the presence of a mycobacteria in a biological sample.

[0018] U.S. Pat. No. 5,783,386 describes polynucleotides associated with virulence in mycobacteria, and particularly a fragment of DNA isolated from M. bovis that contains a region encoding a putative sigma factor. Also provided are methods for a DNA sequence or sequences associated with virulence determinants in mycobacteria, and particularly in M. tuberculosis and M. bovis. In addition, the invention provides a method for producing strains with altered virulence or other properties, which can themselves be used to identify and manipulate individual genes.

[0019] U.S. Pat. No. 5,955,077 relates to novel antigens from mycobacteria capable of evoking early (within 4 days) immunological responses from T-helper cells in the form of gamma-interferon release in memory immune animals after rechallenge infection with mycobacteria of the tuberculosis complex. The antigens of the invention are believed useful especially in vaccines, but also in diagnostic compositions, especially for diagnosing infection with virulent mycobacteria. Also disclosed are nucleic acid fragments encoding the antigens as well as methods of immunizing animals/humans and methods of diagnosing tuberculosis.

[0020] U.S. Pat. No. 6,596,281 describes two genes for proteins of M. tuberculosis have been sequenced. The DNAs and their encoded polypeptides can be used for immunoassays and vaccines. Cocktails of at least three purified recombinant antigens, and cocktails of at least three DNAs encoding them can be used for improved assays and vaccines for bacterial pathogens and parasites.

[0021] U.S. Pat. No. 5,700,683 provides specific genetic deletions that result in an avirulent phenotype of a mycobacterium. These deletions may be used as phenotypic markers of providing a means for distinguishing between disease-producing and non-disease producing mycobacteria.

[0022] U.S. Pat. No. 5,225,324 relates to a family of DNA insertion sequences (ISMY) of mycobacterial origin and other DNA probes which may be used a probes in assay methods for the identification of mycobacteria and the differentiation between closely related mycobacterial strains and species. The use of ISMY, and of proteins and peptides encoded by ISMY, in vaccines, pharmaceutical preparations and diagnostic test kits is also disclosed.

[0023] WO0066157 patent application provides for polypeptides encoded by open reading frames present in the genome of Mycobacterium tuberculosis but absent from the genome of BCG and diagnostic and prophylactic methodologies using these polypeptides.

[0024] U.S. Pat. No. 6,458,366 discloses compounds and methods for diagnosing tuberculosis. The compounds provided include polypeptides that contain at least one antigenic portion of one or more M. tuberculosis proteins, and DNA sequences encoding such polypeptides. Diagnostic kits containing such polypeptides or DNA sequences and a suitable detection reagent may be used for the detection of M. tuberculosis infection in patients and biological samples. Antibodies directed against such polypeptides are also provided.

[0025] S. T. Cole has sequences the complete genome sequence of the best-characterized strain of Mycobacterium tuberculosis, H37Rv. The sequence has been analyzed in order to improve our understanding of the biology of this slow-growing pathogen and to help the conception of new prophylactic and therapeutic interventions. [Nature 393, 537-544 (1998)]

[0026] In a multicomponent analysis to determine the association of polymorphism to the degree of virulence and infectivity is in progress. These polymorphisms constitute a set of putative virulence markers that are being validated in 120 clinical isolates of tuberculosis. The study results in a set of virulence markers, which could be used in predicting the degree of virulence and infectivity of Mycobacterium infections.

[0027] There is no data or technical information in the prior art, which permits to select specifically potential new targets and protective antigens for new drugs and vaccine compositions to treat and prevent infectious diseases including mycobacterial diseases, particularly tuberculosis and leprosy.

### SUMMARY OF THE INVENTION

[0028] The object of the present invention is to identify genes which encode for essential proteins or regulatory nucleotidic sequences in the survival or infection of mycobacterium species as also all infectious diseases and which could be useful for the design of drugs and vaccines based on the knowledge of comparative genomics.

[0029] Yet another object of the present invention is to provide for the identification of strains including mycobacterium in disease samples, for the specific recognition of pathogenic strains, for precisely distinguishing closely related strains including mycobacterial strains and for defining virulence and resistance patterns.

[0030] The method according to the invention has the advantage to reduce drastically the number of potential new targets and protective antigens by giving for the first time an exhaustive description of conserved SNPs in different M. tuberculosis strains, which cause tuberculsosis. The isolated polynucleotides described in the present invention, which are highly conserved in genomic sequences of virulent strains are essential for the survival or the virulence of these strains, in particular mycobacteria, in the host. The identification of antigens and potentially therapeutic targets has been made by a method of comparative genomic analysis.

[0031] The invention is directed to identifying virulence factors in M. tuberculosis & other infectious diseases, using both strands of DNA, RNA and/or proteins associated with the virulence factors, allowing identification of the strain, typing of the strain and finally giving orientation to its potential degree of virulence, infectivity and/or latency.

[0032] Accordingly this invention provides a nucleotide sequences for diagnosis, identification of the strain, typing of the strain and giving orientation to its potential degree of virulence, infectivity and/or latency of all infectious diseases having a SEQ ID nos 1 to 2531.

[0033] The invention is further directed to a method comprising of aligning the genomic sequences of different mycobacteria species to

[0034] a. Select a polynucleotide sequence highly conserved amongst the virulent strains and corresponds to an essential gene for the survival or the virulence of mycobacterium species

[0035] b. Select polymorphisms between virulent and avirulent strains to identify genes and regions conferring virulence to the former strains

[0036] c. And optionally, testing the polynucleotide selected for its capacity of virulence or involved in the survival of a mycobacterium species said testing being based on the activation or inactivation of said polynucleotide in a bacterial host or said testing being based on the activity of the product of expression of said polynucleotide in vivo or in vitro.

[0037] The invention further comprises of identification of following polymorphisms, having potential to be used as reagents and in diagnostics, drug and vaccine development for infectious diseases:

[0038] i. Identical nucleotide in. virulent strains/species, but a different nucleotide in avirulent strains/species at the same position

[0039] ii. Some of the virulent strains differ in the nucleotide sequence at specific positions and share the nucleotide sequence with that of avirulent strains.

[0040] Yet another object of the present invention is to provide for the identification of strains including mycobacterium in disease samples, for the specific recognition of pathogenic strains, for precisely distinguishing closely related strains including mycobacterial strains and for defining virulence and resistance patterns.

[0041] The method according to the invention has the advantage to reduce drastically the number of potential new targets and protective antigens by giving for the first time an exhaustive description of conserved SNPs in different M. tuberculosis strains, which cause tuberculsosis. The isolated polynucleotides described in the present invention, which are highly conserved in genomic sequences of virulent strains are essential for the survival or the virulence of these strains, in particular mycobacteria, in the host. The identification of antigens and potentially therapeutic targets has been made by a method of comparative genomic analysis.

[0042] The invention is directed to identifying virulence factors in M. tuberculosis & other infectious diseases, using both strands of DNA, RNA and/or proteins associated with the virulence factors, allowing identification of the strain, typing of the strain and finally giving orientation to its potential degree of virulence, infectivity and/or latency.

[0043] Accordingly this invention provides a nucleotide sequences for diagnosis, identification of the strain, typing of the strain and giving orientation to its potential degree of virulence, infectivity and/or latency of all infectious diseases having a SEQ ID nos 1 to 2531.

[0044] The invention is further directed to a method comprising of aligning the genomic sequences of different mycobacteria species to

[0045] a. Select a polynucleotide sequence highly conserved amongst the virulent strains and corresponds to an essential gene for the survival or the virulence of mycobacterium species

[0046] b. Select polymorphisms between virulent and avirulent strains to identify genes and regions conferring virulence to the former strains

[0047] c. And optionally, testing the polynucleotide selected for its capacity of virulence or involved in the survival of a mycobacterium species said testing being based on the activation or inactivation of said polynucleotide in a bacterial host or said testing being based on the activity of the product of expression of said polynucleotide in vivo or in vitro.

[0048] The invention further comprises of identification of following polymorphisms, having potential to be used as reagents and in diagnostics, drug and vaccine development for infectious diseases:

[0049] i. Identical nucleotide in virulent strains/species, but a different nucleotide in avirulent strains/species at the same position

[0050] ii. Some of the virulent strains differ in the nucleotide sequence at specific positions and share the nucleotide sequence with that of avirulent strains.

[0051] The invention relates to the identification and analysis of Non-synonymous SNPs to predict conservative and non-conservative amino acid substitutions. The effect of the substitution on the function of the proteins encoded provided a powerful insight in predicting SNPs correlating with virulence and infectivity in infectious diseases for example M. tuberculosis.

[0052] The invention further relates to proteins, RNA, DNA and metabolites encoded by the region carrying the polymorphisms in tuberculosis and other infectious disease causing organisms; which can be utilized for developing drugs and vaccines effective against tuberculosis and other infectious diseases, plays a important role in gene therapy, RNAi technology and imaging.

[0053] The invention is also directed to a process for the production of recombinant polypeptides and chimeric polypeptides comprising them, antibodies generated against these polypeptides, immunogenic or vaccine compositions comprising at least one polypeptide useful as protective antigens or capable to induce a protective response in vivo or in vitro against mycobacterium infections, immunotherapeutic compositions comprising at least such a polypeptide according to the invention, and the use of such nucleic acids and polypeptides in diagnostic methods, vaccines, kits, or antimicrobial therapy.

[0054] SEQ ID Nos. 1 to 1829 are single nucleotide polymorphisms.

[0055] SEQ ID Nos. 1830 to 2286 is an insertion/deletion (indel)

[0056] SEQ ID No 2287 to 2531 are regions of long polymorphism.

[0057] The present invention also includes primer sequences for amplifying the region around the polymorphism SEQ ID nos 1 to 2531

[0058] The nucleotide sequences flanking the polymorphisms of SEQ ID Nos. 1 to 2531 to a length of 35 nucleotides on either side are used in reagents and in diagnostics, drug development, RNAi, gene therapy and other such technologies.

[0059] SEQ ID Nos 1 to 2531 are used as targets for drug design using bioinformatics and other tools, drug development, for gene therapy and vaccine development. This invention also includes the use of proteins, RNA, DNA and metabolites encoded by the region carrying the polymorphisms having a SEQ ID Nos. 1 to 2531 for RNAi technology and antisense technologies.

[0060] This invention also includes a database for identification and selection of the polymorphisms having SEQ ID nos. 1 to 2531.

### BRIEF DESCRIPTION OF THE FIGURES AND TABLES

[0061] FIG. 1 describes Entity Relationship Model.

[0062] FIG. 2 illustrates the identification of SNPs in M. tuberculosis strains H37Rv, CDC1551 and M. bovis BCG. A total of 1829 SNP's have been identified in the three genomes. Of these 1825 SNPs are identical in H37Rv and CDC1551, with a different nucleotide in BCG. 1579 of these are in ORFs while the rest (246) are in non-coding regions. The SNPs in the ORF are categorized into synonymous, non-synonymous SNPs. The latter are further categorized on the basis of the change in primary structure of the protein that results - conservative for no-change and non-servative for changed primary structure of protein encoded.

[0063] FIG. 3 illustrates the identification of indels in M. tuberculosis strains H37Rv, CDC1551 and M. bovis BCG. A total of 794 indels have been identified in the three genomes. Of these, 237 are present in both H37Rv and CDC1551 with respect to BCG, 178 in ORF and 59 are outside the ORF.

[0064] FIG. 4 illustrates Identification of long plymorphisms in M. tuberculosis strains H37Rv, CDC1551 and M. bovis BCG. 136 polymorphisms are present in the three genomes, 30 of them being identical to CDC1551 and H37Rv. 22 of these polymorphisms are present in the ORFs while 8 are outside the ORF.

[0065] FIG. 5 display shows a region of 10 kb of the BCG genome with three types of annotations: BCG ORF's, SNP's in H37Rv, and SNP's in CDC1551.

[0066] FIG. 6 shows the comparative genomics browser displaying BCG in the upper panel and H37Rv in the bottom panel. The segments labeled MUM-* are the perfect matches generated by the MUMmer tool, and the vertical lines show the alignment of the MUM segments in both genomes. The color coding of the ORF's is used to indicate the length of the ORF. This is very helpful to researchers because if an ORF in H37 aligns with an ORF in BCG but they have different colors, then there is a mutation that makes them have different lengths (see for example the genes in the MUTM-1280 region).

[0067] FIG. 7.1-7.25 are the primers used for the amplification to encompass the regions of polymorphisms.

[0068] Table 1 gives the list of Single Nucleotide Polymorphisms in Mycobacterium tuberculosis/M. bovis BCG.

[0069] Table 2 gives the list of Insertions/deletions (Indels) in Mycobacterium tuberculosis/M. bovis BCG.

[0070] Table 3 gives the list of long polymorphisms in Mycobacterium tuberculosis/M. bovis BCG.

[0071] Table 4 lists Polymorphisms in genes involved in cell wall synthesis.

[0072] Table 5 lists Polymorphisms in transcription factors.

[0073] Table 6 lists Polymorphisms in genes involved in lipid metabolism

[0074] Table 7 lists Polymorphisms in genes encoding membrane transport proteins

[0075] Table 8 lists Polymorphisms in genes implicated in virulence

### DETAILED DESCRIPTION OF THE INVENTION

[0076] The Mycobacterium tuberculosis complex consists of six species—M. tuberculosis, M. bovis, M. caitotti, M. microtii and M. africanum. Of these, the genomes of two different strains of M. tuberculosis, which are virulent and infective to humans, have been completely sequenced, while the complete genome of M. bovis BCG, which is non-virulent and non-infective has also been sequenced. Only partial sequences are available for the other species. All Mycobacterium sequences available in the NCBI, EMBL, GENBANK, Sanger and TIGR databases were retrieved and compiled.

[0077] The total numbers of sequences retrieved are as follows:

| Species name | No of sequences retrieved |
|---|---|
| Mycobacterium africanum | 16 |
| Mycobacterium canetti | 03 |
| Mycobacterium microtii | 24 |
| Mycobacterium tuberculosis | 1274 |
| Mycobacterium bovis | 183 |

[0078] The complete genomes of Mycobacterium tuberculosis strains H37Rv (referred to as H37Rv) and CDC1551 (referred to as CDC1551) - both of which are virulent and infective to humans) and Mycobacterium bovis BCG (referred to as BCG)—non-virulent and non-infective in humans - were aligned and a database constructed. The structure of the database is given in FIG. 1.

[0079] Sequences were aligned using the pairwise alignment tool “MUMmer-3.08” (www.tigr.org).

[0080] The use of MUMmer required three distinct steps:

[0081] 1. running MUMmer for each of the target genomes (CDC1551 and H37Rv) against the reference genome (BCG)

[0082] 2. parsing the MUMmer output using to produce a list of polymorphisms, and loading these data into a polymorphism database.

[0083] 3. generating feature files for visualization, and loading these features into a feature database.

[0084] BCG was chosen as the reference genome and compare the two tuberculosis strains, CDC1551 and H37Rv, against the reference. MUMmer uses fasta files as input and was run using the following command line:

| run-mummer1 bovis.fasta cdc1551.fasta BCG-CDC | | | |
|---|---|---|---|
| which takes the format, | | | |
| program | <reference> | <query> | <output> |

[0085] The BCG-CDC parameter provides the file name prefix for the output files, the bovis.fasta parameter is the reference fasta file, and the CDC1551.fasta parameter is the name of the query fasta sequence file.

[0086] The database is generated using the scripts:

[0087] Parsing MUMmer .align file to extract polymorphism data

[0088] The file is parsed to extract useful information and stored it in a much simpler tab-delimited text file format. A custom perl script named mum-parse.pl which uses the Perl module Parse::RecDescent to create a recursive descent parser based on the grammar contained in the custom file Muinmer. pm. is used to run the following command line:
$ perl./mum-parse.pl—mummer1—outfile=../mummer/BCG-CDC./mummer/BCG-CDC.align

[0089] This creates three output files:

[0090] 1. BCG-CDC.gaps—this is the initial output file that simply lists the location of all exact matches in the two sequences.

[0091] 2. BCG-CDC.errorgaps—this is a processed version of the gaps file.

[0092] 3. BCG-CDC.align—this is the fully annotated file that is used to locate all polymorphisms.

[0093] Pairwise alignments of BCG-H37Rv and BCG-CDC1551 was done using the BCG genomic sequence as reference. Results of the alignment identified three types of polymorphisms:

[0094] 1. SNPs—single nucleotide polymorphisms in one or more of the sequences aligned.

[0095] 2. indels—insertion or deletion of one or more bases in the sequences aligned.

[0096] 3. Long polymorphic regions—regions with numerous changes in the sequences aligned.

Inserting the Annotation of the Complete Genomes into the Database

[0097] The gene annotation downloaded from either genbank or EMBL is included into the database by running the following script
$/work/mtb/scripts annot.pl—seq=[filename]—dbname=[NAME]—user=[NAME]—password=[PASS]
filename indicates either genbank or the EMBL genes annotation file.
Inserting the Data into the DB

[0098] To insert the CDC1551 SNP's into the DB the following command is run:
$ perl/work/mtb/scripts/snp-insert.pl—snp=../mummer/BCG-CDC.snp—user=[NAME]—password=[PASS]—query_acc=NC_{—}002755

[0099] To insert the H37Rv SNP's into the DB run the following command is run:
$ perl/work/mtb/scripts/snp-insert.pl—snp=../mummer/BCG-H37.snp—user=[NAME]—password=[PASS]—query_acc=NC_{—}000962

[0100] To determine whether SNP's are synonymous or non-synonymous, whether they are within or outside an open reading frame is first determined. All SNP's that lie within an ORF are taken and the amino acid for that codon containing the SNP is determined.

[0101] To determine if the BCG locations lie within ORF's run the following command is run:
$ perl/work/mtb/scripts/snp-orf-ref.pl—ref_seq=../seqs/bovis.fasta—user=[NAME]—password=[PASS]

[0102] All BCG locations within ORF's must have their amino acids determined. To do so, the following command is run:
$ perl/work/mtb/scripts/ref-aa.pl—ref_seq=../seqs/bovis.fasta—user=[NAME]—password=[PASS]

[0103] Next, the H37Rv and CDC1551 locations are mapped. To assign the CDC1551 ORF's the following command is run:
$ perl/work/mtb/scripts/snp-orf2.pl—query_seq=../seqs/CDC1551.fasta—user=[NAME]—password=[PASS]

[0104] To assign the H37Rv ORF's the following command is run:
$ perl scripts/snp-orf2.pl—query_seq=../seqs/H37Rv.fasta—user=[NAME]—password=[PASS]

[0105] To determine whether the CDC1551 SNP's are synonymous or non-synonymous the following command is run:
$ cd/work/mtb/scripts
$ perl s/work/mtb/scripts/synomous.pl—bcg_file=../seqs/bovis.fasta—query_seq=../seqs/CDC1551.fasta—user=[NAME]—password=[PASS]

[0106] To determine whether the H37Rv SNP's are synonymous or non-synonymous the following command is run:
$ cd /work/mtb/scripts
$ perl/work/mtb/scripts/synomous.pl—bcg_file=../seqs/bovis.fasta—bcg_file=../seqs/H37Rv.fasta—user=[NAME]—password=[PASS]

[0107] A set of summary columns are used to coallesce all the SNP data in one place. To do this, the following command is run:
$ perl/work/mtb/scripts/compare-snps.pl—user=[NAME]—password=[PASS]

[0108] To insert data into the SNP analysis table the SNP data from the SNP, SEQ_SNP and gene ontology tables is fetched and entered into the SNP_analysis table. This step also identifies the conservative and non-conservative amino acids.

[0109] To do this, the following program is run:
$ run.sh/work/mtb/scripts/

[0110] The SNP data in the database is thus complete.

Analysis of SNPs

[0111] The SNPs identified were of two kinds:

[0112] i. Identical nucleotide in CDC1551 and H37Rv, but a different nucleotide in BCG at the same position.

[0113] ii. One of the three sequences is polymorphic; the nucleotide sequence of CDC1551 and H37Rv are different from each other and one of them is identical to the BCG sequence at identical positions.

[0114] The SNPs thus identified were categorized according to their location in Open Reading Frames. SNPs falling within the ORF of both BCG and H37Rv were identified. The results were validated by determining if the SNPs were present in the ORFs of BCG and CDC1551.

[0115] The SNPs falling in ORFs were further categorized into synonymous and non-synonymous SNPs. A SNP was said to cause a non-synonymous change if:

[0116] 1) It occurs in an ORF

[0117] 2) It occurs in the *same* ORF in the genome it is being compared to.

[0118] In some cases a SNP can be in one ORF in the reference sequence but in another ORF in the comparison sequence, e.g. due to a frame-shift mutation earlier in the sequence.

[0119] So before we assign SNP's to ‘Non Synonymous’ or ‘synonymous’ groupings all SNP's which either did not fall in an ORF, or fell into different ORF's on the reference and comparison sequences were eliminated. The BCG and H37 genomes have been annotated with respect to one another. However CDC1551 has not been so thoroughly annotated, so it was not possible to immediately assess if an ORF in BCG was the corresponding ORF in CDC. Therefore, a metric was devised to eliminate spurious comparisons.

[0120] The non-synonymous SNPs thus identified was analysed to predict conservative and non-conservative amino acid substitutions. The effect of the substitution on the function of the proteins encoded was predicted. This provides a powerful insight in predicting SNPs correlating with virulence and infectivity in M.tuberculosis.

[0121] Below is an example of the output obtained from the database.

[image]

[0122] The above figure describes the SNP details, which is as follows:

[0123] Bovis_pos—Bovis position having a SNP.

[0124] Bovis_ORF—Y es indicates that the SNP in bovis is in bovis ORF. No indicates not in ORF.

[0125] Bovis_base—Indicates the SNP detailSNP pos ition in bovis

[0126] Bovis_AA—Displays the bovis amino acid after the codon translation.

[0127] Qry_name—Displays the name of a strain, example H37Rv or microtii

[0128] Qry_pos—Displays the position of a SNP in either CDC1551 or H37Rv with respect to bovis SNP position.

[0129] Qry_ORF—Displays Yes if the SNP falls in the ORF of the query (H37Rv or CDC1551)

[0130] Qry_base—Displays the query SNP.

[0131] Qry_AA—Displays the amino acid of the query (H37Rv or CDC1551).

[0132] Is_nsSNP—Displays SNPs synonymous (S), non-synonymous (NS) and SNPs in non-coding region (NC).

[0133] Conservative_subst—Displays homologous substitution in H37rv and CDC1551.

[0134] Fun_annotation—Will display the functional annotation of the query.

[0135] A list of Single nucleotide polymorphisms identified in the manner described above is given in Table 1.

[0136] A total of 1829 have been identified in the three genomes. Of these 1825 SNPs consist of having the same nucleotide in H37Rv and CDC1551, with a different nucleotide in BCG. Of thel829 SNPs, 1579 are in ORFs while the rest (246) are in non-coding regions. 811 H37Rv SNPs and 810 CDC1551 SNPs are synonymous while 1282 H37Rv and 1219 CDC1551 SNPs are non-synonymous. Out of 1219 CDC1551 nsSNPs, 312 SNPs have conservative amino acid substitution, 888 have non-conservative substitution and 19 results in truncated proteins. Out of 1282 H37Rv non-synomous SNPs, 304 have conservative amino acid substitution, 954 have non-conservative substitution and 24 results in truncated proteins. (FIG. 2)

Analysis of Indels (Insertions and Deletions):

[0137] Indels are insertions and deletions in the sequence with respect to BCG sequence. These indels could be of one or more nucleotides. Considering BCG as reference sequence, the indels in the both the strains of M.tuberculosis, H37rv and CDC1551 were identified.

[0138] To insert the indels from the align file of the mummer output into the database, the following java program is run:
$ java/work/mtb/scripts/indel

[0139] To enter functional annotation from the gene ontology database into the indels table, the following program is run:
$ java/work/mtb/scripts/indfunction

[0140] The list of indels identified is given in Table 2.

[0141] A total of 794 indels have been identified in the three genomes. Of these, 237 (H37Rv) and 237 (CDC1551) indels are present in both H37Rv and CDC1551 with respect to BCG. Of these, 178 are in ORF and 59 are outside the ORF. (FIG. 2)

Analysis of Long polymorphs:

[0142] Long polymorphs are insertions or deletions of long stretches of nucleotides with respect to BCG sequence.

[0143] To insert the long polymorphs from the align file of the mummer output into the database, following java program is run:
$ java/work/mtb/scripts/indel

[0144] To enter the functional annotation from the gene ontology database into the long polymorph table, following java program is run:
$ java/work/mtb/scripts/indfunction

[0145] A table listing the long polymorphisms is given in Table 3.

[0146] A total of 136 long polymorphisms have been identified in the three genomes. Of these, 30 (H37Rv) and 30 (CDC1551) indels are present in both H37Rv and CDC1551 with respect to BCG. Of these, 22 are in ORF and 8 are outside the ORF. (FIG. 3)

Functional Annotation of the Polymorphisms Identified

[0147] In order to identify polymorphisms with a putative functional association, a tool was built using the Gene Ontology DB (GO). The EMBL sequence DB has made putative GO assignments to most of the ORF's in the three TB genomes, so a local installation of GO was used together with the EMBL cross reference tables to identify TB polymorphisms based on their putative functional classification.

[0148] The annotation table consisting of the genbank features of the genes such as coding region, database reference and product information to name a few was constructed.

[0149] To inserts the gene ontology features such as term definition and name from the gene ontology database into the indels and long polymorph table, following program is run:
$ java/work/mtb/scripts/indfunctionl

[0150] The following are the list of attributes in the annotation table.

[0151] Accession no—This indicates the accession number of the sequences

[0152] Gene_start—This indicates the start of the coding region

[0153] Gene_end—This indicates the end of the coding region

[0154] Locus_tag—

[0155] db_xref—This indicates the gene indices representation of the gene

[0156] db_xref_GOA—This indicates the gene ontology identity of the gene product

[0157] id—This indicates the gene annotation

[0158] type—

[0159] strand—This indicates the forward or reverse strand of the sequence that is stored in the genbank

[0160] gene_name—This indicates the gene name

[0161] gene_link—This provides a hyperlink to the gene features form the genbank

[0162] note—This provides the general information and the protein information of the gene.

[0163] A front-end was constructed as an essential part of the database:

Front End of the Database:

[0164] The front-end displaying the results of alignment as follows:

[0165] The annotation table consists of genbank annotation about the genes in bovis, H37Rv and CDC1551. It specifies details including the coding region of a gene and its database reference.

[0166] The annotation id for the SNPs, indels and long polymorphs has been hyperlinked to obtain all the records pertaining to a particular gene.

[0167] The data pertaining to indels and long polymorphs have also been added to the front-end.

Description of the Queries:

[0168] The database is made queryable to retrieve the required features of SNPs, indels and long polymorphs respectively.

[0169] The main options to query the SNP information are:

Select SNPs

[0170] ALL—This displays all the records which satisfies the below features.

[0171] Identical in both queries—This query indicates that SNPs are present in BCG with respect to H37Rv and CDC1551.

[0172] Different bases in both queries—This query indicates different nucleotides in H37Rv and CDC1551.

[0173] Having SNPs in BCG-H37 only—This query specifies SNPs in BCG and H37Rv only and not in CDC1551.

[0174] Having SNPs in BCG-CDC only—This query specifies SNPS in BCG and CDC1551 only and not in H37Rv.

[0175] BCG-H37 SNPs—This query indicates, that SNPs are present in H37Rv with respect to BCG-position and may or may not be present in CDC1551 at that particular position.

[0176] BCG-CDC SNPs—This query indicates, that SNPs are present in CDC1551 with respect to BCG position and may or may not be present in H37Rv at that particular position.

[0177] The other options considered are:

[0178] Select BCG ORF—This provides an option to select the presence of BCG SNPs in BCG ORF or outside the BCG ORF.

[0179] Select query ORF—This provides an option to select the presence of query SNPs in query ORF or outside the query ORF.

[0180] Select synonymous—This provides an option to select if the SNP is synonymous or non-synonymous.

[0181] Select Conservative—This provides an option to select if the non-synonymous SNP results in conservative, non-conservative substitution or truncated protein.

[0182] Select function—This provides an option to select a required function, which includes cell wall synthesis, Transcription factor, Lipid metabolism, Membrane transport and Surface proteins.

[0183] An example of a query to extract SNP information from the database is shown below.

[image]

[0184] The result obtained from the above query is shown below:

[image]

[0185] The query has been designed in the similar way for both indels and long polymorphs.

[0186] The SNP analysis includes functional annotation id, which is hyperlinked to the functional annotation of the gene carrying the polymorphism. The functional annotation id consists of either one of the Swiss Prot, SPTREMBL or gene ontology id's. Similarly the indels and long polymorphs are also functionally annotated.

[0187] Genes with known involvement in virulence of Mycobacterium tuberculosis can also be accessed from the SNP database query or from the Long polymorphs database query respectively.

[0188] Polymorphisms involved in the following functions have been identified:

[0189] 1. Cell wall synthesis

[0190] 2. Transcription factor

[0191] 3. Lipid metabolism

[0192] 4. Membrane transport

[0193] 5. Surface proteins.

[0194] 6. Virulence genes

[0195] One such query for cell wall synthesis function is shown below

[image]

[0196] The output of the above query is shown below

[image]

[0197] The polymorphisms detected in genes involved in cell wall synthesis are listed in Table 4.

Visualization Tools

[0198] To increase the utility of the SNP data, two tools to visualize the Tuberculosis SNP data have been created: the first tool was based on the Generic Genome Browser developed at Cold Spring Harbor Lab (CSHL). This visualization tool could show a single TB genome along with any annotations, e.g. SNP locations for all other genomes.

[0199] The details of the browser is as follows:

[0200] The output displays the polymorphs in the region of interest.

[0201] Alternatively the output can be obtained by specifying the region of interest in the text box labeled as “landmark or region”. In case of SNP, the gene start and the gene end has to be specified and in case of indels or long polymorphs, the BCG start and BCG end must be specified.

[0202] By clicking the ruler at the region of interest across the genome, the view can be re-centered.

[0203] The display can also be zoomed in or out by selecting the required number of base pairs in the scroll down menu.

[0204] The required features can be displayed by selecting the options in the tracks checkbox as shown in FIG. 4

[0205] FIG. 4 display shows a region of 10 kb of the BCG genome with three types of annotations: BCG ORF's, SNP's in H37Rv, and SNP's in CDC1551.

[0206] To compare multiple genomes, a second tool based on the WormBase synteny browser was built. This tool can visualize two TB genomes at one time and was very useful in validating the polymorphisms the CDC1551 genome as shown in FIG. 5.

[0207] FIG. 5 shows the comparative genomics browser displaying BCG in the upper panel and H37Rv in the bottom panel. The segments labeled MUM-* are the perfect matches generated by the MUMmer tool, and the vertical lines show the alignment of the MUM segments in both genomes. The color coding of the ORF's is used to indicate the length of the ORF. This is very helpful to researchers because if an ORF in H37 aligns with an ORF in BCG but they have different colors, then there is a mutation that makes them have different lengths (see for example the genes in the MUM-1280 region).

[0208] A methodical screening of all the regions of polymorphism identified above in clinical isolates with known disease profiles to further home-in on the polymorphisms associated with virulence and/or infectivity in M.tuberculosis is in progress.

2. Screening of Regions of Polymorphisms

[0209] A set of five Mycobacterium tuberculosis strains with known virulence is being screened for the polymorphisms identified above.

[0210] Strains chosen: The following strains have been chosen for the study:

[0211] a. H37Rv—a reference laboratory strain known to be infective to mice, but is only mildly infective in humans. It has undergone a number of passages in the lab since its isolation. It is the standard used in studies on tuberculosis in different laboratories across the world.

[0212] b. Beijing strain—a clinical isolate with known virulence and infectivity in humans. 70% of the patients with tuberculosis in certain areas of India and China are infected with this strain. The strain was isolated from a patient in the Western Indian state of Mumbai.

[0213] c. S.I—a mild South Indian strain with only mild virulence and infectivity in humans isolated from a patient residing in the South Indian state of Hyderabad.

[0214] d. N.I.F—Fatal North Indian strain isolated from Safderjung hospital, Delhi where the patient developed pulmonary tuberculosis died.

[0215] e. N.I.NF—a non-fatal North Indian strain isolated from Safderjung hospital, Delhi. Known clinical progression of disease in the patient.

[0216] Primers have been designed to encompass the regions of polymorphisms. The list of the primers used for the amplification is given in the FIG. 6.1-6.25

[0217] Amplification and sequencing of regions around the polymorphisms: DNA from the five strains has been amplified under optimal conditions determined for each primer pair. The amplified fragments have been sequenced and the sequences obtained from different strains compared.

[0218] A few examples are given below:

| | |
|---|---|
| | 60 70 80 90 100 110 |
| | +---------+---------+---------+---------+---------+----- |
| BCG | ACCGATCTCGCCGCGCAGACAATGGCTGGCTCAGCGGCGATGCTGCTGGAGCGGAT |
| H37Rv | ++++++++++++++++++++++++++++++++++++++++++++++++++++++++ |
| CD1551 | ++++++++++++++++++++++++++++++++++++++++++++++++++++++++ |
| SI | ++++++++++++++++++++++++++++++++++++++++++++++++++++++++ |
| NINF | ++++++++++++++++++++++++++++++++++++++++++++++++++++++++ |
| BS | ++++++++++++++++++++++++++++++++++++++++++++++++++++++++ |
| NIF | ++++++++++++++++++++++++++++++++++++++++++++++++++++++++ |

| | |
|---|---|
| | 120 130 140 150 160 170 |
| | ----+---------+---------+---------+---------+---------+ |
| BCG | GGACCAAGACCAGGGTGGCGCCAATGGCGAGCTGATGGGGCTGCGCGTGGACCTT |
| H37Rv | +++G+++++++++++++++++++++++++++++++++++++++++++++++++++ |
| CD1551 | +++G+++++++++++++++++++++++++++++++++++++++++++++++++++ |
| SI | +++G+++++++++++++++++++++++++++++++++++++++++++++++++++ |
| NINF | +++G+++++++++++++++++++++++++++++++++++++++++++++++++++ |
| BS | +++G+++++++++++++++++++++++++++++++++++++++++++++++++++ |
| NIF | +++G+++++++++++++++++++++++++++++++++++++++++++++++++++ |

[0219] Sequencing of the region from 1H-590622 to H-591026. Sequences are amplified from different strains. BCG: M.bovis BCG; H37Rv: M. tuberculosis strain H37Rv sequence from NCBI database; CDC: CDC1551; S.I: South Indian strain A2313; NINF: non-lethal North Indian strain; BS: Beijing strain; NIF: Lethal North Indian strain. The gene coding for oxidoreductase activity is a virulence gene which does not show any differences between the M.tuberculosis strains, but has a conservative polymorphism with M.bovis BCG.

| | |
|---|---|
| | 130 140 150 160 170 180 190 200 210 |
| | +--------+---------+---------+---------+---------+---------+---------+---------+ |
| BCG | CCAGGCCTCGATCGACGATCTGGCGTCTCTCGAAGAAGACTTTACCGTTGCACGTCGCCGTCTACCGGCGGGTGATTGCGG |
| H37Rv | +++++++++++++++++++++++++++++++++++++++++++-+++++++++++++++++++++++++++++++++++++ |
| NINF | +++++++++++++++++++++++++++++++++++++++++++-+++++++++++++++++++++++++++++++++++++ |
| BS | +++++++++++++++++++++++++++++++++++++++++++-+++++++++++++++++++++++++++++++++++++ |
| CDC1551 | +++++++++++++++++++++++++++++++++++++++++++-+++++++++++++++++++++++++++++++++++++ |
| SI | +++++++++++++++++++++++++++++++++++++++++++-+++++++++++++++++++++++++++++++++++++ |
| NIF | +++++++++++++++++++++++++++++++++++++++++++-+++++++++++++++++++++++++++++++++++++ |

[0220] Sequencing of the region from 11-138548 to 11-139067. Sequences are amplified from different strains. BCG: M.bovis BCG; H37Rv: M.tuberculosis strain H37Rv sequence from NCBI database; CDC: CDC1551; S.I: South Indian strain A2313; BS: Beijing strain; NINF: non-lethal North Indian strain; NIF: Lethal North Indian strain The insertion in BCG leads to a shorter protein with a different carboxyl terminal compared to the transcription factor encoded by the tuberculosis strains.

| | |
|---|---|
| | 10 20 30 40 50 60 70 |
| | +---------+---------+---------+---------+---------+-----+--- |
| BCG | GTGGCGAGCCGGCAAACCCCTGCTGAGCTGGCCAGATGCGACTTGGCTAAGACCGCGGAGCGCG |
| CDC1551 | +++++++++++++++A++++++++++++++++++++++++++++++++++++++++++++++++ |
| H37Rv | +++++++++++++++A++++++++++++++++++++++++++++++++++++++++++++++++ |
| BS | +++++++++++++++-++++++++++++++++++++++++++++++++++++++++++++++++ |
| NTNF | +++++++++++++++-++++++++++++++++++++++++++++++++++++++++++++++++ |
| SI | +++++++++++++++-++++++++++++++++++++++++++++++++++++++++++++++++ |

| | |
|---|---|
| | 80 90 100 110 120 130 |
| | ------+---------+---------+---------+---------+---------\| |
| BCG | AGCACACCCCGACGGCGACTGCGACAACTCCAAGCGTGGCCGGTAACGTGATGCCCA |
| H37Rv | +++++++++++++++++++++++++++++++++++++++++++++++++++++++++ |
| BS | +++++++++++++++++++++++++++++++++++++++++++++++++++++++++ |
| NTNF | +++++++++++++++++++++++++++++++++++++++++++++++++++++++++ |
| SI | +++++++++++++++++++++++++++++++++++++++++++++++++++++++++ |

| | |
|---|---|
| | 131 140 150 160 170 180 190 |
| | \|--------+---------+---------+---------+---------+---------+--- |
| BCG | TGATTGTGCGTTCCCTTCCCGCTGCGTTGCGCGCGTGTGCGCGTCTGCAACCCCATGACCCGG |
| CDC1551 | +++G+++++++++++++++++++++++++++++++++++++++++++++++++++++++++++ |
| H37Rv | +++G+++++++++++++++++++++++++++++++++++++++++++++++++++++++++++ |
| BS | +++G+++++++++++++++++++++++++++++++++++++++++++++++++++++++++++ |
| NTNF | +++G+++++++++++++++++++++++++++++++++++++++++++++++++++++++++++ |
| SI | +++G+++++++++++++++++++++++++++++++++++++++++++++++++++++++++++ |

| | |
|---|---|
| | 200 210 220 230 240 250 |
| | ------+---------+---------+---------+---------+---------+ |
| BCG | CCTTCACGTTTATGGATTACGAACAGGACTGGGACGGCGTTGCGATAACCCTGACGT |
| CDC1551 | +++++++++++++++++++++++++++++++++++++++++++++++++++++++++ |
| H37Rv | +++++++++++++++++++++++++++++++++++++++++++++++++++++++++ |
| BS | +++++++++++++++++++++++++++++++++++++++++++++++++++++++++ |
| NTNF | +++++++++++++++++++++++++++++++++++++++++++++++++++++++++ |
| SI | +++++++++++++++++++++++++++++++++++++++++++++++++++++++++ |

| | |
|---|---|
| | 251 260 270 280 290 300 310 |
| | \|---------\|---------+--------- +---------+---------+---------+-- |
| BCG | GGTCGCAGCTGTATCGGCGAACGCTGAATGTGGCACGGGAGCTGAGCCGTTGTGGTTCCAGGT |
| CDC1551 | +++++++++++++++++++++++++++++++++++++++++++++++++++++++++++C+G |
| H37Rv | +++++++++++++++++++++++++++++++++++++++++++++++++++++++++++C+G |
| BS | +++++++++++++++++++++++++++++++++++++++++++++++++++++++++++C+G |
| NTNF | +++++++++++++++++++++++++++++++++++++++++++++++++++++++++++C+G |
| SI | +++++++++++++++++++++++++++++++++++++++++++++++++++++++++++C+G |

| | |
|---|---|
| | 320 330 340 350 360 370 |
| | -------+---------+---------+---------+---------+---------+ |
| BCG | CGCAGCTGTATCGGCGAACGCTGAATG--TGGCACGGGAGCTGAGCCGTTGTGGTTC |
| CDC1551 | -+TGA+C+CG+-++T++T+T+++CTCCGCA++G++TC+++-+AC+T+++C+CCT+++ |
| H37Rv | -+TGA+C+CG+-++T++T+T+++CTCCGCA++G++TC+++-+AC+T+++C+CCT+++ |
| BS | -+TGA+C+CG+-++T++T+T+++CTCCGCA++G++TC+++-+AC+T+++C+CCT+++ |
| NTNF | -+TGA+C+CG+-++T++T+T+++CTCCGCA++G++TC+++-+AC+T+++C+CCT+++ |
| SI | -+TGA+C+CG+-++T++T+T+++CTCCGCA++G++TC+++-+AC+T+++C+CCT+++ |

[0221] Sequencing of the region from H-3283171 to H-3283585. Two SNPs, one indel and a long polymorphism characterize this region. Sequences are amplified from different strains. BCG: M.bovis BCG; H37Rv: M.tuberculosis strain H37Rv sequence from NCBI database; CDC: CDC1551; S.I South Indian strain A2313; BS: Beijing strain; NIF: non-lethal North Indian strain. All the polymorphisms occur in the fadD28, a virulence gene involved in fatty acid synthesis. They result in a non-conservative substitution and probably have an important role in the degree of virulence imparted to the strain.

| | 130 140 150 160 170 180 190 200 210 |
|---|---|
| | +---------+---------+---------+---------+---------+---------+---------+---------+ |
| BCG | TTGGCCCACGTGCTGAACTTGGTGACGTTGGCTGCGGTGACAAACAAGTTCTGATAGGTCGTTGCGCCCGTCGGCCCGAAG |
| H37Rv | +++++++++++++++++++++++++++++++++++++++++++++++C+++++++++++++++++++++++++++++++++ |
| CDC1551 | +++++++++++++++++++++++++++++++++++++++++++++++C+++++++++++++++++++++++++++++++++ |
| NINF | +++++++++++++++++++++++++++++++++++++++++++++++A+++++++++++++++++++++++++++++++++ |
| SI | +++++++++++++++++++++++++++++++++++++++++++++++A+++++++++++++++++++++++++++++++++ |
| BS | +++++++++++++++++++++++++++++++++++++++++++++++A+++++++++++++++++++++++++++++++++ |
| | 211 230 240 250 260 270 280 290 |
| | ---------+---------+---------+---------+---------+---------+---------+--------- |
| BCG | ATGAGTTGGCCCATGAGTTGGGTGTATTGGGTGCTGAGTGTGGCCAGGCCCTGCAGCAGGGTCGGGATGATGTCGAACG |
| H37Rv | +++++++++++++++++++++++++++++++++++++++++++++++++++++++++++++++++++++++++++++++++ |
| CDC1551 | +++++++++++++++++++++++++++++++++++++++++++++++++++++++++++++++++++++++++++++++++ |
| NINF | +++++++++++++++++++++++++++++++++++++++++++++++++++++++++++++++++++++++++++++++++ |
| SI | +++++++++++++++++++++++++++++++++++++++++++++++++++++++++++++++++++++++++++++++++ |
| BS | +++++++++++++++++++++++++++++++++++++++++++++++++++++++++++++++++++++++++++++++++ |
| | 300 310 320 330 340 350 360 370 380 |
| | +---------+---------+---------+---------+---------+---------+---------+---------+ |
| BCG | GAAACTGCGCCGCTGCACTCGAAAGCGCGGTTGTCACCGCATTGGTGCCGCTCGCTAGGGCGGTCGCTTSCCCCGTTGCGG |
| H37Rv | +++++++++++++++++++++++++++++++++++++++++++++++++++++++++++++++++++++G+++++++++++ |
| CDC1551 | +++++++++++++++++++++++++++++++++++++++++++++++++++++++++++++++++++++G+++++++++++ |
| NINF | +++++++++++++++++++++++++++++++++++++++++++++++++++++++++++++++++++++G+++++++++++ |
| SI | +++++++++++++++++++++++++++++++++++++++++++++++++++++++++++++++++++++G+++++++++++ |
| BS | +++++++++++++++++++++++++++++++++++++++++++++++++++++++++++++++++++++G+++++++++++ |

[0222] Sequencing of the region from H-2051784 to H-2052209. This region is characterized by a SNP between M.bovis BCG and the tuberculosis strains and a second SNP common to the Asian strains and to BCG, but different from H37Rv and CDC1551. Sequences are amplified from different strains. BCG: M.bovis BCG; H37Rv: M.tuberculosis strain H37Rv sequence from NCBI database; CDC: CDC1551; S.I: South Indian strain A2313; BS: Beijing strain; NINF: non-lethal North Indian strain. The SNP common to all the tuberculosis strains results in a conservative substitution in the PPE33b gene and does not affect the function of this gene. However the A to G substitution results in the truncation of the protein encoded by BCG.

150 160 170 180 190 200 210 220 230 240
+---------+---------+---------+---------+---------+---------+---------+---------+---------+

| | |
|---|---|
| BCG | CATCGTCGCCGGCGCGGGTCACTGGCGCCGCTCCTCCCCATCGCTTTGCTCTGCATCGTCGCCGGCGCGGGTCACTGGCGCCGCTCCTCCC |
| H37Rv | +++++++++++++++++++++---------------------------------------------------------------------- |
| CDC1551 | +++++++++++++++++++++---------------------------------------------------------------------- |
| SI | +++++++++++++++++++++CTGGCGCCGCTCCTCCCCATCGCTTTGCTCTGCATCGTCGCCGGCGCGGGTCACTGGCGCCGCTCCTCCC |
| BS | +++++++++++++++++++++CTGGCGCCGCTCCTCCCCATCGCTTTGCTCTGCATCGTCGCCGGCGCGGGTCACTGGCGCCGCTCCTCCC |
| NINF | +++++++++++++++++++++CTGGCGCCGCTCCTCCCCATCGCTTTGCTCTGCATCGTCGCCGGCGCGGGTCACTGGCGCCGCTCCTCCC |

241 250 260 270 280 290 300
+---------+---------+---------+---------+---------+---------+

| | |
|---|---|
| BCG | CATCGCTTTGCTCTCTGCATCGTCGCCGGCGCGGGTCAATCGAAGATGCCCCGTCGCGTGTC |
| H37Rv | ------------------------------------++++++++++++++++++A+++++ |
| CDC1551 | ------------------------------------++++++++++++++++++H+++++ |
| SI | CATCGCTTTGCTCTGCATCGTCGCCGGCGCGGGTCA++++++++++++++++++A+++++ |
| BS | CATCGCTTTGCTCTGCATCGTCGCCGGCGCGGGTCA++++++++++++++++++A+++++ |
| NINF | CATCGCTTTGCTCTGCATCGTCGCCGGCGCGGGTCA++++++++++++++++++A+++++ |

[0223] Sequencing of the region from H-3006917 to H-3007246. Sequences are amplified from different strains. BCG: M.bovis BCG; H37Rv: M.tuberculosis strain H37Rv sequence from NCBI database; CDC: CDC1551; S.I: South Indian strain A2313; BS: Beijing strain; M18: non-lethal North Indian strain. This region encloses a long polymorphism of 106bp inserted into a gene encoding an integral membrane protein in BCG and the Asian strains. This results in a longer integral membrane product in these strains as compared to H37Rv and CDC1551. The SNP also results in the introduction of a stop codon in H37Rv and CDC1551 further reducing the length of the membrane protein encoded by the latter.

| | 40 50 60 70 80 90 100 110 120 |
|---|---|
| | +---------+---------+---------+---------+---------+---------+---------+---------+ |
| BCG | CTGGGTCAGCAGCGGGTGTGCGCTGATTTCGATGAAGGTGTGGTAGGCGCCGTCGGCGCCGCTACCGGCGGAAGCGATGGC |
| BS | +++++++++++++++++++++++++++++++++++++++++++++++++++++++++++++++++++++++++++++++++ |
| NINF | +++++++++++++++++++++++++++++++++++++++++++++++++++++++++++++++++++++++++++++++++ |
| SI | +++++++++++++++++++++++++++++++++++++++++++++++++++++++++++++++++++++++++++++++++ |
| H37Rv | +++++++++++++++++++++++++++++++++++++++++++++++++++++++++++++++++++++++++++++++++ |
| CDC1551 | +++++++++++++++++++++++++++C+++++++++++++++++++++++++++++++++++++++++++++++++++++ |
| | 121 130 140 150 160 170 180 190 200 |
| | ---------+---------+---------+---------+---------+---------+---------+---------+ |
| BCG | CTGGCTGGAAATGCACGGGGTTGCGCATGTTGGTGGCCCAGTGTTCGGCGTCGAAGACCGGTTGGGTGTGCAAGTCTGCGT |
| BS | +++++++++++++++++++++++++++++++++++++++++++++++++++++++++++++++++++++++++++++++++ |
| NINF | +++++++++++++++++++++++++++++++++++++++++++++++++++++++++++++++++++++++++++++++++ |
| SI | +++++++++++++++++++++++++++++++++++++++++++++++++++++++++++++++++++++++++++++++++ |
| H37Rv | +++++++++GC++++++++++++++++++++++++++++++++++++++++++++++++++++++++++++++++++++++ |
| CDC1551 | +++++++++++++++++++++++++++++++++++++++++++++++++++++++++++++++++++++++++++++++++ |
| | 201 210 220 230 240 250 260 270 280 |
| | ---------+---------+---------+---------+---------+---------+---------+---------+ |
| BCG | AGGTGGTGGAGATGATTCCGATGGTGGGGGTCCGTGGGGTCAGATCGGCCAGCTCCGAACGCATCGCCGGCTGCAAAGCA |
| BS | +++++++++++++++++++++++++++++++++++++++++++++++++++++++++++++++++++++++++++++++++ |
| NINF | +++++++++++++++++++++++++++++++++++++++++++++++++++++++++++++++++++++++++++++++++ |
| SI | +++++++++++++++++++++++++++++++++++++++++++++++++++++++++++++++++++++++++++++++++ |
| H37Rv | +++++++++++++++++++++++++++++++++++++++++++++++++++++++++++++++++++++++++++++++++ |
| CDC1551 | +++++++++++++++++++++++++++++++++++++++++++++++++++++++++++++++++++++++++++++++++ |
| | 281 281 300 310 320 330 340 350 360 |
| | ---------+---------+---------+---------+---------+---------+---------+---------+ |
| BCG | TCCATGGCCGGATTGTGCGGGGCCACTTCGATATTGACCCGGCTGGCGAATCGGTCCCTAGCGCGCACGCGAGTGATCAA |
| BS | +++++++++++++++++++++++++++++++++++++++++++++++++++++++++++++++++++++++++++++++++ |
| NINF | +++++++++++++++++++++++++++++++++++++++++++++++++++++++++++++++++++++++++++++++++ |
| SI | +++++++++++++++++++++++++++++++++++++++++++++++++++++++++++++++++++++++++++++++++ |
| H37Rv | +++++++++++++++++++++++++++++++++++++++++++++++++A+++++A++C+++TTTGC++++++++C++G+C++++++ |
| CDC1551 | +++++++++++++++++++++++++++++++++++++++++++++++++A+++++A++C+++TTTGC++++++++C++G+C++++++ |

[0224] Sequencing of the region from H-3247737 to H-3248224 Sequences are amplified from different strains. BCG: M.bovis BCG; H37Rv: M.tuberculosis strain H37Rv sequence from NCBI database; CDC: CDC1551; S.I: South Indian strain A2313; BS: Beijing strain; NINF: non-lethal North Indian strain. All the polymorphisms observed occur in ppsA—the polyketide synthase gene and are synonymous substitutions. All the three Asian strains show identity to BCG in this region.

| | 100 110 120 130 140 150 160 |
|---|---|
| | +---------+---------+---------+---------+---------+---------+----- |
| BCG | CGCGGTACACGTGTCGAACGGCGACAAACCCAAGGTTGCCTTGCCCGATACTCAGTTGGGTTCACA |
| H37Rv | ++++++++++++++++++++++++++++++++++++++++++++++++++++++++++++++++++ |
| BS | ++++++++++++++++++++++++++++++++++++++++++++++++++++++++++++++++++ |
| SI | ++++++++++++++++++++++++++++++++++++++++++++++++++++++++++++++++++ |
| NINF | ++++++++++++++++++++++++++++++++++++++++++++++++++++++++++++++++++ |
| CDC1551 | ++++++++++++++++++++++++++++++++++++++++++++++++++++++++++++++++++ |
| NIF | ++++++++++++++++++++++++++++++++++++++++++++++++++++++++++++++++++ |
| | 170 180 190 200 210 220 230 |
| | ----+---------+---------+---------+---------+---------+---------+ |
| BCG | CTCAACGTGATTCGAAATCCACACTGATACTGGAGGTGATTACCGGCTGAAGCAAAGCGCATTGG |
| H37Rv | ++G++++++++++++++++++++++++++++++++++++++++++++++++++++++++++++++ |
| BS | ++G++++++++++++++++++++++++++++++++++++++++++++++++++++++++++++++ |
| SI | ++G++++++++++++++++++++++++++++++++++++++++++++++++++++++++++++++ |
| NINF | ++G++++++++++++++++++++++++++++++++++++++++++++++++++++++++++++++ |
| CDC1551 | ++G++++++++++++++++++++++++++++++++++++++++++++++++++++++++++++++ |
| NIF | ++G++++++++++++++++++++++++++++++++++++++++++++++++++++++++++++++ |

[0225] Sequencing of the region from H-2052524 to H-2052863. Sequences are amplified from different strains. BCG: M.bovis BCG; H37Rv: M.tuberculosis strain H37Rv sequence from NCBI database; CDC: CDC1551; S.I: South Indian strain A2313; BS: Beijing strain; N1NF: non-lethal North Indian strain; NIF: Lethal North Indian strain .A single nucleotide polymorphism occurring in the proton transport gene PPF,33b results in the introduction of a stop codon and hence truncation of the protein in BCG.

| | |
|---|---|
| | 190 200 210 220 230 240 |
| | +---------+---------+---------+---------+---------+--------- |
| BCG | CATCGGCCGAAACGTGAGTAATCTGGGCGGCC---------------------------- |
| CDC1551 | ++++++++++++++++++++++++++++++++CGCTCAGCGCCCAGGGCATCGAAGAACA |
| H37Rv | ++++++++++++++++++++++++++++++++CGCTCAGCGCCCAGGGCATCGAAGAACA |
| BS | ++++++++++++++++++++++++++++++++CGCTCAGCGCCCAGGGCATCGAAGAACA |
| NINF | ++++++++++++++++++++++++++++++++CGCTCAGCGCCCAGGGCATCGAAGAACA |
| SI | ++++++++++++++++++++++++++++++++CGCTCAGCGCCCAGGGCATCGAAGAACA |

| | |
|---|---|
| | 250 260 270 280 290 |
| | +---------+---------+---------+---------+ |
| BCG | -------------------GTGGCTCGGGGCGGCCCACACC |
| CDC1551 | AGCCCAGGGTGGCCTTGTC+++++C++++++++++++++++ |
| H37Rv | AGCCCAGGGTGGCCTTGTC+++++C++++++++++++++++ |
| BS | AGCCCAGGGTGGCCTTGTC+++++C++++++++++++++++ |
| NINF | AGCCCAGGGTGGCCTTGTC+++++C++++++++++++++++ |
| SI | AGCCCAGGGTGGCCTTGTC+++++C++++++++++++++++ |

[0226] Sequencing of the region from H-1468644 to H-1469150. Sequences are amplified from different strains. BCG: M.bovis BCG; H37Rv: M.tuberculosis strain H37Rv sequence from NCBI database; CDC: CDC1551;S.I: South Indian strain A2313; BS: Beijing strain; NINF: non-lethal North Indian strain. An insertion of 47bp is seen in all the tuberculosis strains in Mbl346c, a gene with DNA binding activity. A second polymorphism (SNP) is also seen immediately adjacent to the insertion in the same gene. The SNP results in splitting the gene into two genes while there is a single long gene in the M.tuberculosis strains.

| | 190 200 210 220 230 240 |
|---|---|
| | +---------+---------+---------+---------+---------+---- |
| BCG | TGTTGGCTTCATCAGCACCCCGAGGTGTGTATTCAGGCGATCCGGGGCAGCG |
| CDC1551 | ++++++++++++++++++++++++++++--++++++++++++++++C+++T++++ |
| H37Rv | ++++++++++++++++++++++++++++--++++++++++++++++C+++T++++ |
| NINF | ++++++++++++++++++++++++++++--++++++++++++++++C+++T++++ |
| SI | ++++++++++++++++++++++++++++--++++++++++++++++C+++T++++ |
| BS | ++++++++++++++++++++++++++++--++++++++++++++++C+++T++++ |

| | 250 260 270 280 290 |
|---|---|
| | -----+---------+---------+---------+---------+ |
| BCG | GGGTCGGGGTGACGCGGTTCCGCCCAAAGGTCC--GTCACCCTGTG |
| CDC1551 | +++++++++++++++++++++++++++++++++AC+++++++++++ |
| H37Rv | +++++++++++++++++++++++++++++++++AC+++++++++++ |
| NINF | +++++++++++++++++++++++++++++++++AC+++++++++++ |
| SI | +++++++++++++++++++++++++++++++++AC+++++++++++ |
| BS | +++++++++++++++++++++++++++++++++AC+++++++++++ |

[0227] Sequencing of the region from H-455094 to H-455468. Sequences are amplified from different strains. BCG: M.bovis BCG; H37Rv: M.tuberculosis strain H37Rv sequence from NCBI database; CDC: CDC1551; S.I: South Indian strain A2313; BS: Beijing strain; NINF: non-lethal North Indian strain. The region is characterized by the occurrence of two indels and two SNPs in a transcription regulator. All the tuberculosis strains appear to be identical in this region while BCG, has a different amino-acid sequence in the region.

| | |
|---|---|
| | 60 70 80 90 100 110 120 |
| | +---------+---------+---------+---------+---------+---------+ |
| BCG | CAGATCGGCTCGGTCCGCTTCGCGATTTACCGCTCGGACTATGTGCAGTCGGTGACGGCTC |
| CDC1551 | ++++++++++++++++++++++++++++++++T++++++++++++++++++++++++++++ |
| H37Rv | ++++++++++++++++++++++++++++++++T++++++++++++++++++++++++++++ |
| BS | ++++++++++++++++++++++++++++++++T++++++++++++++++++++++++++++ |
| NTNF | ++++++++++++++++++++++++++++++++T++++++++++++++++++++++++++++ |
| SI | ++++++++++++++++++++++++++++++++T++++++++++++++++++++++++++++ |
| NIF | ++++++++++++++++++++++++++++++++T++++++++++++++++++++++++++++ |

| | |
|---|---|
| | 130 140 150 160 |
| | ---------+---------+---------+---------\| |
| BCG | ++++++++++++++++++++++++++++++A+++++++++ |
| CDC1551 | ++++++++++++++++++++++++++++++A+++++++++ |
| H37Rv | ++++++++++++++++++++++++++++++A+++++++++ |
| BS | ++++++++++++++++++++++++++++++A+++++++++ |
| NTNF | ++++++++++++++++++++++++++++++A+++++++++ |
| SI | ++++++++++++++++++++++++++++++A+++++++++ |
| NIF | ++++++++++++++++++++++++++++++A+++++++++ |

[0228] Sequencing of the region from H-466229 to H-466536. Sequences are amplified from different strains. BCG: M.bovis BCG; H37Rv: M. tuberculosis strain H37Rv sequence from NCBI database; CDC: CDC1551; S.I: South Indian strain A2313; BS: Beijing strain; NINF: non-lethal North Indian strain; NIF: Lethal North Indian strain .The C to T transition occurs in a gene of unknown function and results in a synonymous substitution. However, the C to A change occurs in a transcription factor (Mb0393) and is a non-conservative substitution resulting in a slightly different protein in BCG.

| | 130 140 150 160 170 180 190 200 |
|---|---|
| | +---------+---------+---------+---------+---------+---------+---------+ |
| BCG | CCGCCAGGGTTACACCGACGTCGACCAGTTCACACTCGAAAAGTAACCGGACAAAGCGCGCTGGCTACCCA |
| CDC1551 | ++++++++++++++++++++++++++++++++++++G++++++++++++++++++++++++++++++++++ |
| H37Rv | ++++++++++++++++++++++++++++++++++++G++++++++++++++++++++++++++++++++++ |
| NIF | ++++++++++++++++++++++++++++++++++++G++++++++++++++++++++++++++++++++++ |
| NINF | ++++++++++++++++++++++++++++++++++++G++++++++++++++++++++++++++++++++++ |
| BS | ++++++++++++++++++++++++++++++++++++G++++++++++++++++++++++++++++++++++ |
| SI | ++++++++++++++++++++++++++++++++++++G++++++++++++++++++++++++++++++++++ |

[0229] Sequencing of the region from H-560625 to H-561248. Sequences are amplified from different strains. BCG: M.bovis BCG; H37Rv: M.tuberculosis strain H37Rv sequence from NCBI database; CDC: CDC1551; S.I: South Indian strain A2313; BS: Beijing strain; NINF: non-lethal North Indian strain; NIF: Lethal North Indian strain. A synonymous SNP occurs in a virulence gene and is identical in all the tuberculosis strains.

| | 150 160 170 180 190 200 |
|---|---|
| | --+---------+---------+---------+---------+---------+ |
| BCG | GGCCCACGATTTGCAATGGTGACGAGTTGGCTGCCTCGGCGCTGGCGTACTAG |
| H37Rv | +++++++++++++++++++++++++++++++++++++++++++++++++++G+ |
| CDC1551 | +++++++++++++++++++++++++++++++++++++++++++++++++++G+ |
| BS | +++++++++++++++++++++++++++++++++++++++++++++++++++G+ |
| SI | +++++++++++++++++++++++++++++++++++++++++++++++++++G+ |
| NINF | +++++++++++++++++++++++++++++++++++++++++++++++++++G+ |
| NIF | +++++++++++++++++++++++++++++++++++++++++++++++++++G+ |

| | 210 220 230 240 250 |
|---|---|
| | ---------+---------+---------+---------+---------+ |
| BCG | GCCGCCCCCGCGCTCATGAGCTGGACGAACTGCTCATGGAATGCGACCGC |
| H37Rv | +++++++++++++++++++++++++++++++++++++++++++++++++ |
| CDC1551 | +++++++++++++++++++++++++++++++++++++++++++++++++ |
| BS | +++++++++++++++++++++++++++++++++++++++++++++++++ |
| SI | +++++++++++++++++++++++++++++++++++++++++++++++++ |
| NINF | +++++++++++++++++++++++++++++++++++++++++++++++++ |
| NIF | +++++++++++++++++++++++++++++++++++++++++++++++++ |

[0230] Sequencing of the region from H-2046394 to H-2046928. Sequences are amplified from different strains. BCG: M.bovis BCG; H37Rv: M.tuberculosis strain H37Rv sequence from NCBI database; CDC: CDC1551; S.I: South Indian strain A2313; BS: Beijing strain; NINF: non-lethal North Indian strain; NIF: Lethal North Indian strain. The SNP in BCG results in splitting the gene PE-PGRS32 into two parts with the latter being truncated.

| | 40 50 60 70 80 90 |
|---|---|
| | +---------+---------+---------+---------+---------+----- |
| BCG | ACGATCATCGGTGGTGGTGGAGCCGGTATGGTAGCTACCGCCACGCGGAAGCTGGT |
| CDC1551 | ++++++++++++++++++++++++A+++++++++++++++++++++++++++++ |
| H37Rv | ++++++++++++++++++++++++A+++++++++++++++++++++++++++++ |
| NINF | ++++++++++++++++++++++++A+++++++++++++++++++++++++++++ |
| SI | ++++++++++++++++++++++++A+++++++++++++++++++++++++++++ |
| BS | ++++++++++++++++++++++++A+++++++++++++++++++++++++++++ |
| NIF | ++++++++++++++++++++++++A+++++++++++++++++++++++++++++ |

| | 100 110 120 130 140 150 |
|---|---|
| | ----+---------+---------+---------+---------+---------+ |
| BCG | CGGCGGGCGCTTCATGGCGATGACGACCGGACCGGACAGGTCTATGCCGGACGCG |
| CDC1551 | ++++++++++++++++++++++++++++++++++++++++++++++++++++++ |
| H37Rv | ++++++++++++++++++++++++++++++++++++++++++++++++++++++ |
| NINF | ++++++++++++++++++++++++++++++++++++++++++++++++++++++ |
| SI | ++++++++++++++++++++++++++++++++++++++++++++++++++++++ |
| BS | ++++++++++++++++++++++++++++++++++++++++++++++++++++++ |
| NIF | ++++++++++++++++++++++++++++++++++++++++++++++++++++++ |

| | 151 160 170 180 190 200 |
|---|---|
| | +--------+--------+---------+---------+---------+------ |
| BCG | GCGACCGCGGCCACCGGGGTGATAACGGCGTGCACCGGCGCGGTTCTCCCGGGGAA |
| CDC1551 | +++++++++++++++++++++++++++++++++++++++++++++++++++++++ |
| H37Rv | +++++++++++++++++++++++++++++++++++++++++++++++++++++++ |
| NINF | +++++++++++++++++++++++++++++++++++++++++++++++++++++++ |
| SI | +++++++++++++++++++++++++++++++++++++++++++++++++++++++ |
| BS | +++++++++++++++++++++++++++++++++++++++++++++++++++++++ |
| NIF | +++++++++++++++++++++++++++++++++++++++++++++++++++++++ |

| | 210 220 230 240 250 260 |
|---|---|
| | ---+---------+---------+---------+---------+---------+ |
| BCG | TACCGGAGCCGCGCCGCCGACCGCACTGGCGAATACCAACGGGGCAATCGCTGC |
| CDC1551 | ++++++++++++++C++++++++++++++++++++++++++++++++++++++ |
| H37Rv | ++++++++++++++T++++++++++++++++++++++++++++++++++++++ |
| NINF | ++++++++++++++C++++++++++++++++++++++++++++++++++++++ |
| SI | ++++++++++++++C++++++++++++++++++++++++++++++++++++++ |
| BS | ++++++++++++++C++++++++++++++++++++++++++++++++++++++ |
| NIF | ++++++++++++++C++++++++++++++++++++++++++++++++++++++ |

[0231] Sequencing of the region from 11-1373629 to 11-1374101. Sequences are amplified from different strains. BCG: M.bovis BCG; H37Rv: M. tuberculosis strain H37Rv sequence from NCBI database; CDC: CDC1551; S.I: South Indian strain A2313; BS: Beijing strain; NINF: non-lethal North Indian strain; NIF: Lethal North Indian strain. The two polymorphisms observed occur in a transcription factor and result in non-conservative substitutions.

| | 220 230 240 250 260 270 280 |
|---|---|
| | +---------+---------+---------+---------+---------+---------+ |
| BCG | TCTCTCGGTCATTCGTGGTCGCAGGCGCCGCACTCGGTGTCTTCGGGGGGGGGGGGGGGGG |
| H37Rv | ++++++++++++++++++++++++++++++++++++++++++++++T++++--------- |
| CDC1551 | ++++++++++++++++++++++++++++++++++++++++++++++T++++--------- |
| SI | ++++++++++++++++++++++++++++++++++++++++++++++T++++--------- |
| BS | ++++++++++++++++++++++++++++++++++++++++++++++T++++--------- |
| NINF | ++++++++++++++++++++++++++++++++++++++++++++++T++++--------- |
| NIF | ++++++++++++++++++++++++++++++++++++++++++++++T++++--------- |

| | 290 300 310 320 330 340 |
|---|---|
| | ---------+---------+---------+---------+---------+---------+ |
| BCG | GGGGGGGGGGGAAGCGCGACCTCGAAGGCCACTGAAACGCCTTACGGAGACGCGACGAAC |
| H37Rv | -----------++++++++++++++++++++++++++++++++++++++++++++++++ |
| CDC1551 | -----------++++++++++++++++++++++++++++++++++++++++++++++++ |
| SI | -----------++++++++++++++++++++++++++++++++++++++++++++++++ |
| BS | -----------++++++++++++++++++++++++++++++++++++++++++++++++ |
| NINF | -----------++++++++++++++++++++++++++++++++++++++++++++++++ |
| NIF | -----------++++++++++++++++++++++++++++++++++++++++++++++++ |

[0232] Sequencing of the region from H-1622821 to H-1623282. Sequences are amplified from different strains. BCG: M.bovis BCG; H37Rv: M.tuberculosis strain H37Rv sequence from NCBI database; CDC: CDC1551; S.I: South Indian strain A2313; BS: Beijing strain; NINF: non-lethal North Indian strain; NIF:North Indian Fatal. The polymorphisms observed occur in a non-coding region outside the ORF.

| | 150 160 170 180 190 200 210 220 230 |
|---|---|
| | +---------+---------+---------+---------+---------+---------+---------+---------+ |
| BCG | TGTGGCGCGCCTGGCTCAGATAACGCAACGCCGCAGGCGCGCGCCGCACGTCAAAAGTGGTGACCGGCAACGGCCGCAGCA |
| CDC1551 | ++++++++++++++++++++++++++++++++++++++++++A++++++++++++++++++++++++++++++++++++++ |
| H37Rv | ++++++++++++++++++++++++++++++++++++++++++A++++++++++++++++++++++++++++++++++++++ |
| SI | ++++++++++++++++++++++++++++++++++++++++++A++++++++++++++++++++++++++++++++++++++ |
| BS | ++++++++++++++++++++++++++++++++++++++++++A++++++++++++++++++++++++++++++++++++++ |
| NINF | ++++++++++++++++++++++++++++++++++++++++++A++++++++++++++++++++++++++++++++++++++ |

[0233] Sequencing of the region from 11)2295752 to H-2296046. Sequences are amplified from different strains. BCG: M.bovis BCG; H37Rv: M.tuberculosis strain H37Rv sequence from NCBI database; CDC: CDC1551; S.I: South Indian strain A2313; BS: Beijing strain; NINF: non-lethal North Indian strain. The polymorphism observed occurs in the pks12 gene and results in a non-conservative substitution.

| | 30 40 50 60 70 80 90 |
|---|---|
| | +---------+---------+---------+---------+---------+---------+ |
| BCG | TGGGCCGCTCTAGATGGGCGCCGCCCCGCGCAGATGCTCGAAGATCAGGGACGTCTGGGTA |
| H37Rv | ++++++++++++++++++++++++++++++++++++++++++++++++++++++++++++ |
| CDC1551 | ++T+++++++++++++++++++++++++++++++++++++++++++++++++++++++++ |
| BS | ++++++++++++++++++++++++++++++++++++++++++++++++++++++++++++ |
| SI | ++++++++++++++++++++++++++++++++++++++++++++++++++++++++++++ |
| NINF | ++++++++++++++++++++++++++++++++++++++++++++++++++++++++++++ |

100 110 120 130 140 150
---------+---------+---------+---------+---------+---------+

| | |
|---|---|
| BCG | CCTGCGACGTCGGCGTCGGCATTGAGGTTTTCGACCACGAACGAACGCAGGTCCTCGGTG |
| H37Rv | +++++++++++++++++++++++++++++++++++++++++++++++++++++++++++ |
| CDC1551 | +++++++++++++++++++++++++++++++++++++++++++++++++++++++++++ |
| BS | +++++++++++++++++++++++++++++++++++++++++++++++++++++++++++ |
| SI | +++++++++++++++++++++++++++++++++++++++++++++++++++++++++++ |
| NINF | +++++++++++++++++++++++++++++++++++++++++++++++++++++++++++ |

| | 151 160 170 180 190 200 |
|---|---|
| | +--------+---------+---------+---------+---------+- |
| BCG | TCGCGAGCGGCGACGTGCAAGATGAAATCGTCGGCGCC------------ |
| H37Rv | ++++++++++++++++++++++++++++++++++++++GGCCAGAAAGTAG |
| CDC1551 | ++++++++++++++++++++++++++++++++++++++GGCCAGAAAGTAG |
| BS | ++++++++++++++++++++++++++++++++++++++GGCCAGAAAGTAG |
| SI | ++++++++++++++++++++++++++++++++++++++GGCCAGAAAGTAG |
| NINF | ++++++++++++++++++++++++++++++++++++++GGCCAGAAAGTAG |

| | 210 220 230 240 250 |
|---|---|
| | --------+---------+---------+---------+---------+ |
| BCG | ----------CTGCCGTTTGCGGCGGATCTGCTGGATGAAGCTGCGGA |
| H37Rv | ACATCCATCAC+++++++++++++++++++++++++++++++++++++ |
| CDC1551 | ACATCCATCAC+++++++++++++++++++++++++++++++++++++ |
| BS | ACATCCATCAC+++++++++++++++++++++++++++++++++++++ |
| SI | ACATCCATCAC+++++++++++++++++++++++++++++++++++++ |
| NINF | ACATCCATCAC+++++++++++++++++++++++++++++++++++++ |

[0234] Sequencing of the region from H-3086111 to H-3086539. Sequences are amplified from different strains. BCG: M.bovis BCG; H37Rv: M.tuberculosis strain H37Rv sequence from NCBI database; CDC: CDC1551; S.I: South Indian strain A2313; BS: Beijing strain; NINF: non-lethal North Indian strain. The SNP seen in H37Rv occurs in a non-coding region while the deletion in BCG leads to truncation of the transcription regulator.

180 190 200 210 220 230 240 250 260 270
+---------+---------+---------+---------+---------+---------+---------+---------+---------+

| | |
|---|---|
| BCG | CGGTCGCGGGCGAAGCGTTTGAAGTCCACCGTCGCCAGGCCGCTGGTCATGGCGCTGGCCTGATCCCACAGACCCCAGCCCAGGGAGATGG |
| H37Rv | +++++++++++++++++++++++++++++++++++++++++++C++++++++++++++++++++++++++++++++++++++++++++++ |
| CDC1551 | +++++++++++++++++++++++++++++++++++++++++++C++++++++++++++++++++++++++++++++++++++++++++++ |
| SI | +++++++++++++++++++++++++++++++++++++++++++C++++++++++++++++++++++++++++++++++++++++++++++ |
| NIF | +++++++++++++++++++++++++++++++++++++++++++C++++++++++++++++++++++++++++++++++++++++++++++ |
| NINF | +++++++++++++++++++++++++++++++++++++++++++C++++++++++++++++++++++++++++++++++++++++++++++ |
| BS | +++++++++++++++++++++++++++++++++++++++++++C++++++++++++++++++++++++++++++++++++++++++++++ |

[0235] Sequencing of the region from H-2295062 to H-2295633. Sequences are amplified from different strains. BCG: M.bovis BCG; H37Rv: M.tuberculosis strain H37Rv sequence from NCBI database; CDC: CDC1551; A2313: South Indian strain A2313; BS: Beijing strain; NINF: non-lethal North Indian strain; NIF:North Indian Fatal. The SNP observed occurs in the pks12 gene and results in a non-conservative substitution.

| | 80 90 100 110 120 130 140 |
|---|---|
| | -+---------+---------+---------+---------+---------+---------+ |
| BCG | CGGCGAGTACAACGACGCTCGGGTCGATGTCCCGGTCCGATGGCTGCACGGCACCG-AGATC |
| H37Rv | ++++++++++++++++++++++++++++++++++++++++++++++++++++++++G+++++ |
| CDC1551 | ++++++++++++++++++++++++++++++++++++++++++++++++++++++++G+++++ |
| BS | ++++++++++++++++++++++++++++++++++++++++++++++++++++++++G+++++ |
| SI | ++++++++++++++++++++++++++++++++++++++++++++++++++++++++G+++++ |
| NINF | ++++++++++++++++++++++++++++++++++++++++++++++++++++++++G+++++ |

| | 150 160 170 180 190 200 |
|---|---|
| | ---------+---------+---------+---------+---------+---------+ |
| BCG | CGGTGATCACGCCCGACCTGCTGGACGGCTATGCCGAGCGGGCCAGCGATTTCGAGGTGG |
| H37Rv | +++++++++++++++++++++++++++++++++++++++++++++++++++++++++++ |
| CDC1551 | +++++++++++++++++++++++++++++++++++++++++++++++++++++++++++ |
| BS | +++++++++++++++++++++++++++++++++++++++++++++++++++++++++++ |
| SI | +++++++++++++++++++++++++++++++++++++++++++++++++++++++++++ |
| NINF | +++++++++++++++++++++++++++++++++++++++++++++++++++++++++++ |

[0236] Sequencing of the region from H-162341 to H-162761. Sequences are amplified from different strains. BCG: M.bovis BCG; H37Rv: M.tuberculosis strain H37Rv sequence from NCBI database; CDC: CDC1551; S.I: South Indian strain A2313; BS: Beijing strain; NINF: non-lethal North Indian strain. The deletion in BCG occurs in the region corresponding to a gene with putative enzyme activity and results in a loss of function in BCG.

120 130 140 150 160 170 180 190 200 210
+---------+---------+---------+---------+---------+---------+---------+---------+---------+

| | |
|---|---|
| BCG | CGCCCGCGCCACGACGTCACTACGCACATTCTATTCCGGAGACCCAGGCGAGGCGTCGGGGCGGCACCGTTTGCAGGCCCGGAATCCCTCC |
| H37Rv | ++++++++++++++++++++++++++++++++C++++++++++++++++++++++++++++++++++++++++++++++++++++++++++ |
| CDC1551 | ++++++++++++++++++++++++++++++++C++++++++++++++++++++++++++++++++++++++++++++++++++++++++++ |
| BS | ++++++++++++++++++++++++++++++++C++++++++++++++++++++++++++++++++++++++++++++++++++++++++++ |
| NTNF | ++++++++++++++++++++++++++++++++C++++++++++++++++++++++++++++++++++++++++++++++++++++++++++ |
| SI | ++++++++++++++++++++++++++++++++C++++++++++++++++++++++++++++++++++++++++++++++++++++++++++ |
| NIF | ++++++++++++++++++++++++++++++++C++++++++++++++++++++++++++++++++++++++++++++++++++++++++++ |

211 220 230 240 250 260 270 280 290 300
+---------+---------+---------+---------+---------+---------+---------+---------+---------+

| | |
|---|---|
| BCG | CCCTGAGCGGCCGCCGCAGTCGGCAGGAACCGGACATTGCGCGCGAACGGTGGCCGGACGGGGCAACTCGGCCGGCAGTAGACACCGGTG |
| H37Rv | ++++++++++++++++++++++++++++++++++++++++++++++++++++++++++++++++++++++++++++++++++++++++++ |
| CDC1551 | ++++++++++++++++++++++++++++++++++++++++++++++++++++++++++++++++++++++++++++++++++++++++++ |
| BS | ++++++++++++++++++++++++++++++++++++++++++++++++++++++++++++++++++++++++++++++++++++++++++ |
| NTNF | ++++++++++++++++++++++++++++++++++++++++++++++++++++++++++++++++++++++++++++++++++++++++++ |
| SI | ++++++++++++++++++++++++++++++++++++++++++++++++++++++++++++++++++++++++++++++++++++++++++ |
| NIF | ++++++++++++++++++++++++++++++++++++++++++++++++++++++++++++++++++++++++++++++++++++++++++ |

301 310 320 330 340 350 360 370 380 390
+---------+---------+---------+---------+---------+---------+---------+---------+---------+

| | |
|---|---|
| BCG | GTCAAAACCGCGACGACGAACCAGCCGTCGAACCGGGCGTCTTTGGACTGGACCGCCCGGTAGCAGCGTTCGAAGTCGTCGTGCACCCTT |
| H37Rv | ++++++++++++++++++++++++++++++++++++++++++++++++++++T++++++++++++++++++++++++++++++++++++ |
| CDC1551 | ++++++++++++++++++++++++++++++++++++++++++++++++++++T++++++++++++++++++++++++++++++++++++ |
| BS | ++++++++++++++++++++++++++++++++++++++++++++++++++++T++++++++++++++++++++++++++++++++++++ |
| NTNF | ++++++++++++++++++++++++++++++++++++++++++++++++++++T++++++++++++++++++++++++++++++++++++ |
| SI | ++++++++++++++++++++++++++++++++++++++++++++++++++++T++++++++++++++++++++++++++++++++++++ |
| NIF | ++++++++++++++++++++++++++++++++++++++++++++++++++++T++++++++++++++++++++++++++++++++++++ |

[0237] Sequencing of -the region from H-1478664 to H-1479140. Sequences are amplified from different strains. BCG: M.bovis BCG; H37Rv: M.tuberculosis strain H37Rv sequence from NCBI database; CDC: CDC1551; S.I: South Indian strain A2313; BS: Beijing strain; NIN: non-lethal North Indian strain; NIF:North Indian Fatal. The first T to C transition results in the truncation of the bacterial regulatory protein in BCG.

| | 170 180 190 200 210 220 |
|---|---|
| | +---------+---------+---------+---------+---------+----- |
| BCG | CCACCTCGGTGGTGTTCGCCACCGCCCACTACGCGCTGGTGGATTTGGCCGACGTA |
| H37Rv | +++++++++++++++++++++++++++++++++++++++++++++++++++CT+CT |
| CDC1551 | +++++++++++++++++++++++++++++++++++++++++++++++++++CT+CT |
| NINF | +++++++++++++++++++++++++++++++++++++++++++++++++++CT+CT |
| BS | +++++++++++++++++++++++++++++++++++++++++++++++++++CT+CT |
| SI | +++++++++++++++++++++++++++++++++++++++++++++++++++CT+CT |
| NIF | +++++++++++++++++++++++++++++++++++++++++++++++++++CT+CT |

| | 230 240 250 260 270 280 |
|---|---|
| | ----+---------+---------+---------+---------+---------+ |
| BCG | CAACCGGGCCAGCGCGTGTTGATCCATGCCGGCACCGGCGGGGTGGGCATGGCGG |
| CDC1551 | AGGT++++++++++++++++++++++++++++++++++++++++++++++++++ |
| NINF | AGGT++++++++++++++++++++++++++++++++++++++++++++++++++ |
| BS | AGGT++++++++++++++++++++++++++++++++++++++++++++++++++ |
| SI | AGGT++++++++++++++++++++++++++++++++++++++++++++++++++ |
| NIF | AGGT++++++++++++++++++++++++++++++++++++++++++++++++++ |

[0238] Sequencing of the region from H-2296260 to H-2296692. Sequences are amplified from different strains. BCG: M.bovis BCG; H37Rv: M.tuberculosis strain H37Rv sequence from NCBI database; CDC: CDC1551; S.I: South Indian strain A2313; BS: Beijing strain; NINF: non-lethal North Indian strain; NIF:North Indian Fatal strain. The long polymorphism observed in the pks12 gene but does not alter the activity of the polyketide synthase enzyme. A total of 2755 polymorphisms including 1779 in ORFs and 313 in regions outside the ORF are being screened for association to virulence and/or infectivity in tuberculosis. A multicomponent analysis to determine the association of polymorphism to the degree. of virulence and infectivity is in progress. The polymorphisms which constitute a set of virulence markers are further being validated in 120 clinical isolates of tuberculosis.

[0239] The virulence factors thus identified could be used as:

[0240] i. Diagnostic markers in prediction of disease and its progress in the patient.

[0241] ii. Drug targets for development of new and effective treatments for TB.

[0242] iii. Candidate genes/sequences in DNA vaccine.

[0243] iv. In development of SiRNA technology for combating tuberculosis.

TABLE 1
List of SNP's in Mycobacterium tuberculosis/M. bovis BCG.

| | | | | | | | | | | De- | | | |
|---|---|---|---|---|---|---|---|---|---|---|---|---|---|
| | | | | | | | | | | scrip- | | | |
| Poly- | | | | | | | | | | tion | | | |
| mor- | BCG | | | H37Rv | | | CDC | | | of | | | |
| phism | SNP | | | SNP | | | SNP | | | SNP | SNP | | |
| ID | Position | Base | AA | Position | Base | AA | Position | Base | AA | ORF | type | GO ID | Putative Function |
| 1 | 467 | G | R | 467 | A | H | 467 | A | H | Yes | NS, NC | P49993 | nucleotide binding |
| | | | | | | | | | | | | | activity |
| 2 | 1057 | A | I | 1057 | G | V | 1057 | G | V | Yes | NS, C | P49993 | nucleotide binding |
| | | | | | | | | | | | | | activity |
| 3 | 2347 | G | G | 2347 | A | D | 2347 | A | D | Yes | NS, NC | Q50790 | DNA binding activity |
| 4 | 2532 | C | L | 2532 | T | L | 2532 | T | L | Yes | S, NULL | Null | — |
| 5 | 3751 | G | V | 3751 | T | L | 3751 | T | L | Yes | NS, C | Q59586 | DNA binding activity |
| 6 | 4480 | T | L | 4480 | C | S | 4480 | C | S | Yes | NS, NC | P71573 | — |
| 7 | 5752 | A | V | 5752 | G | V | 5752 | G | V | Yes | S, NULL | Null | — |
| 8 | 6406 | T | N | 6406 | C | N | 6406 | C | N | Yes | S, NULL | Null | — |
| 9 | 6446 | T | S | 6446 | G | A | 6446 | G | A | Yes | NS, NC | P41514 | nucleic acid binding |
| | | | | | | | | | | | | | activity |
| 10 | 8285 | T | I | 8285 | C | I | 8285 | C | I | Yes | S, NULL | Null | — |
| 11 | 8741 | T | R | 8741 | C | R | 8741 | C | R | Yes | S, NULL | Null | — |
| 12 | 9143 | C | I | 9143 | T | I | 9143 | T | I | Yes | S, NULL | Null | — |
| 13 | 9217 | C | A | 9217 | A | D | 9217 | A | D | Yes | NS, NC | Q07702 | DNA binding activity |
| 14 | 10727 | G | V | 10727 | A | I | 10727 | A | I | Yes | NS, C | P71575 | integral to membrane |
| 15 | 13197 | C | Null | 13197 | G | Null | 13197 | G | null | Yes | S, NULL | Null | — |
| 16 | 13459 | G | D | 13460 | A | D | 13460 | A | D | Yes | S, NULL | Null | — |
| 17 | 14400 | G | E | 14401 | A | K | 14401 | A | K | Yes | NS, NC | P71582 | integral to membrane |
| 18 | 15116 | G | M | 15117 | C | I | 15117 | C | I | Yes | NS, NC | P71583 | enzyme activity |
| 19 | 17856 | C | T | 17857 | T | T | 17857 | T | T | Yes | S, NULL | Null | — |
| 20 | 21818 | C | A | 21819 | A | S | 21819 | A | S | Yes | NS, NC | P71588 | enzyme activity |
| 21 | 22263 | G | A | 22264 | T | A | 22264 | T | A | Yes | S, NULL | Null | — |
| 22 | 23173 | A | L | 23174 | C | R | 23174 | C | null | Yes | NS, NC | P71588 | enzyme activity |
| 23 | 23713 | T | L | 23714 | C | L | 23714 | C | L | Yes | S, NULL | Null | — |
| 24 | 24293 | T | Q | 24294 | C | R | 24294 | C | R | Yes | NS, NC | P71590 | — |
| 25 | 24533 | C | C | 24534 | T | Y | 24534 | T | Y | Yes | NS, NC | P71590 | — |
| 26 | 24678 | G | H | 24679 | A | Y | 24679 | A | Y | Yes | NS, C | P71590 | — |
| 27 | 24761 | C | G | 24780 | T | D | 24762 | T | D | Yes | NS, NC | P71590 | — |
| 28 | 25287 | G | R | 25306 | C | G | 25288 | C | G | Yes | NS, NC | P71590 | — |
| 29 | 26034 | G | P | 26053 | C | A | 26035 | C | A | Yes | NS, NC | P71591 | electron transport |
| 30 | 27450 | G | Null | 27469 | A | Null | 27451 | A | null | No | nc, NULL | Null | — |
| 31 | 29442 | T | L | 29462 | C | P | 29444 | C | P | Yes | NS, NC | P71595 | — |
| 32 | 29979 | C | P | 29999 | A | Q | 29980 | A | Q | Yes | NS, NC | P71596 | — |
| 33 | 30736 | A | K | 30756 | G | K | 30737 | G | K | Yes | S, NULL | Null | — |
| 34 | 31041 | G | R | 31057 | C | R | 31038 | C | R | Yes | S, NULL | Null | — |
| 35 | 32608 | A | N | 32624 | C | H | 32568 | C | N | Yes | NS, NC | P71599 | — |
| 36 | 33788 | A | Null | 33804 | G | Null | 33748 | G | null | No | nc, NULL | Null | — |
| 37 | 36288 | G | A | 36304 | T | A | 36248 | T | A | Yes | S, NULL | Null | — |
| 38 | 36522 | C | S | 36538 | T | S | 36482 | T | S | Yes | S, NULL | Null | — |
| 39 | 36596 | G | K | 36612 | A | K | 36556 | A | K | Yes | S, NULL | Null | — |
| 40 | 39742 | G | H | 39758 | A | H | 39702 | A | H | Yes | S, NULL | Null | — |
| 41 | 41228 | A | Null | 41244 | C | Null | 41188 | C | null | No | nc, NULL | Null | — |
| 42 | 41437 | T | G | 41453 | C | G | 41397 | C | G | Yes | S, NULL | Null | — |
| 43 | 42265 | A | F | 42281 | C | C | 42225 | C | C | Yes | NS, NC | P71696 | integral to membrane |
| 44 | 43929 | G | V | 43943 | A | V | 43889 | A | V | Yes | S, NULL | Null | — |
| 45 | 45177 | A | A | 45191 | G | A | 45137 | G | A | Yes | S, NULL | Null | — |
| 46 | 49989 | A | Null | 50003 | G | Null | 49949 | G | null | No | nc, NULL | Null | — |
| 47 | 52012 | T | S | 52026 | C | G | 51972 | C | G | Yes | NS, NC | P71705 | integral to membrane |
| 48 | 53663 | T | L | 53677 | C | P | 53623 | C | P | Yes | NS, NC | P71707 | enzyme activity |
| 49 | 59861 | A | Null | 59869 | G | Null | 59815 | G | null | No | nc, NULL | Null | — |
| 50 | 62758 | G | G | 62766 | A | G | 62712 | A | G | Yes | S, NULL | Null | — |
| 51 | 63029 | T | Null | 63037 | C | Null | 62983 | C | null | No | nc, NULL | Null | — |
| 52 | 63049 | G | Null | 63057 | C | Null | 63003 | C | null | No | nc, NULL | Null | — |
| 53 | 65857 | A | I | 65865 | G | V | 65811 | G | V | Yes | NS, C | O53607 | hydrolase activity |
| 54 | 69913 | T | I | 69921 | C | T | 69867 | C | T | Yes | NS, NC | O53609 | molecular_function |
| | | | | | | | | | | | | | unknown |
| 55 | 70082 | G | P | 70090 | A | P | 70036 | A | P | Yes | S, NULL | Null | — |
| 56 | 70257 | T | F | 70265 | G | V | 70211 | G | V | Yes | NS, NC | O53609 | molecular_function |
| | | | | | | | | | | | | | unknown |
| 57 | 71758 | T | Null | 71729 | C | Null | 71712 | C | null | No | nc, NULL | Null | — |
| 58 | 74119 | T | L | 74090 | C | L | 74073 | C | L | Yes | S, NULL | Null | — |
| 59 | 74188 | G | N | 74159 | C | K | 74142 | C | K | Yes | NS, NC | O53611 | isocitrate |
| | | | | | | | | | | | | | dehydrogenase |
| | | | | | | | | | | | | | (NADP+) activity |
| 60 | 78130 | C | G | 78101 | T | E | 78084 | T | E | Yes | NS, NC | O53615 | glycine |
| | | | | | | | | | | | | | hydroxymethyltransferase |
| | | | | | | | | | | | | | activity |
| 61 | 79388 | C | Null | 79359 | G | Null | 79342 | G | null | No | nc, NULL | Null | — |
| 62 | 80169 | T | P | 80131 | C | P | 80123 | C | P | Yes | S, NULL | Null | — |
| 63 | 86899 | G | V | 86862 | A | I | 86854 | A | I | Yes | NS, C | O53623 | DNA binding activity |
| 64 | 89235 | T | V | 89198 | G | G | 89190 | G | G | Yes | NS, C | O53625 | — |
| 65 | 89570 | T | Null | 89533 | C | Null | 89525 | C | null | No | nc, NULL | Null | — |
| 66 | 90964 | T | V | 90927 | C | A | 90919 | C | A | Yes | NS, C | Q10880 | oxidative |
| | | | | | | | | | | | | | phosphorylation |
| 67 | 92357 | T | C | 92320 | A | Null | 92312 | A | null | Yes | nc, NULL | Null | — |
| 68 | 94338 | C | T | 94301 | T | M | 94293 | T | M | Yes | NS, NC | Q10883 | oxidative |
| | | | | | | | | | | | | | phosphorylation |
| 69 | 96136 | A | I | 96099 | G | V | 96091 | G | null | Yes | NS, C | Q10884 | electron transport |
| 70 | 97731 | C | Null | 97694 | T | Null | 97686 | T | null | No | nc, NULL | Null | — |
| 71 | 99336 | T | Null | 99299 | C | Null | 99291 | C | null | Yes | nc, NULL | Null | — |
| 72 | 100624 | G | A | 100587 | A | T | 100579 | A | T | Yes | NS, NC | Q10876 | magnesium ion binding |
| | | | | | | | | | | | | | activity |
| 73 | 103635 | G | R | 103598 | A | C | 103590 | A | C | Yes | NS, NC | Q10890 | integral to membrane |
| 74 | 105903 | T | W | 105865 | C | R | 105857 | C | R | Yes | NS, NC | Q10892 | integral to membrane |
| 75 | 106370 | A | P | 106332 | C | P | 106324 | C | P | Yes | S, NULL | Null | — |
| 76 | 122650 | T | W | 122612 | C | R | 122604 | C | R | Yes | NS, NC | Q10898 | cAMP-dependent |
| | | | | | | | | | | | | | protein kinase complex |
| 77 | 123556 | C | H | 123518 | T | Y | 123510 | T | Y | Yes | NS, C | Q10898 | cAMP-dependent |
| | | | | | | | | | | | | | protein kinase complex |
| 78 | 123878 | T | Null | 123840 | C | Null | 123832 | C | null | No | nc, NULL | Null | — |
| 79 | 126600 | A | S | 126561 | C | A | 126554 | C | A | Yes | NS, NC | Q10900 | magnesium ion binding |
| | | | | | | | | | | | | | activity |
| 80 | 126840 | G | P | 126801 | A | S | 126794 | A | S | Yes | NS, NC | Q10900 | magnesium ion binding |
| | | | | | | | | | | | | | activity |
| 81 | 127447 | G | L | 127408 | C | L | 127401 | C | L | Yes | S, NULL | Null | — |
| 82 | 130172 | A | V | 130133 | G | A | 130126 | G | A | Yes | NS, C | Q10900 | magnesium ion binding |
| | | | | | | | | | | | | | activity |
| 83 | 130237 | T | P | 130198 | C | P | 130191 | C | P | Yes | S, NULL | Null | — |
| 84 | 137223 | A | Q | 137183 | G | Q | 137177 | G | Q | Yes | S, NULL | Null | — |
| 85 | 138339 | A | R | 138299 | G | G | 138292 | G | G | Yes | NS, NC | O53636 | — |
| 86 | 139796 | C | Null | 139754 | T | Null | 139747 | T | null | No | nc, NULL | Null | — |
| 87 | 143247 | C | G | 143205 | T | S | 143198 | T | S | Yes | NS, NC | O53639 | DNA binding activity |
| 88 | 146006 | A | A | 145964 | G | A | 145957 | G | A | Yes | S, NULL | Null | — |
| 89 | 147495 | A | W | 147453 | C | W | 147446 | C | W | Yes | S, NULL | Null | — |
| 90 | 147911 | C | Null | 147871 | A | Null | 147864 | A | null | No | nc, NULL | Null | — |
| 91 | 149987 | G | G | 149947 | C | G | 149940 | C | G | Yes | S, NULL | Null | — |
| 92 | 159370 | A | F | 159177 | G | F | 159350 | G | F | Yes | S, NULL | Null | — |
| 93 | 160535 | T | K | 160342 | C | E | 160515 | C | E | Yes | NS, NC | P96809 | — |
| 94 | 161144 | T | F | 160951 | G | V | 161124 | G | V | Yes | NS, NC | P96810 | N-acetyltransferase |
| | | | | | | | | | | | | | activity |
| 95 | 162499 | A | R | 162306 | G | G | 162479 | G | G | Yes | NS, NC | P96811 | enzyme activity |
| 96 | 162530 | G | G | 162337 | A | D | 162510 | A | D | Yes | NS, NC | P96811 | enzyme activity |
| 97 | 165799 | G | G | 165607 | A | D | 165780 | A | D | Yes | NS, NC | P96815 | — |
| 98 | 166696 | A | H | 166504 | G | R | 166677 | G | R | Yes | NS, NC | P96816 | — |
| 99 | 170273 | G | L | 170081 | A | F | 170254 | A | F | Yes | NS, NC | P96820 | voltage-gated chloride |
| | | | | | | | | | | | | | channel activity |
| 100 | 171097 | C | R | 170905 | A | R | 171078 | A | R | Yes | S, NULL | Null | — |
| 101 | 173091 | A | R | 172899 | C | R | 173072 | C | R | Yes | S, NULL | Null | — |
| 102 | 179424 | T | R | 179232 | C | G | 179405 | C | G | Yes | NS, NC | P96828 | — |
| 103 | 181862 | C | G | 181670 | T | D | 181843 | T | D | Yes | NS, NC | P96830 | protein phosphatase |
| | | | | | | | | | | | | | activity |
| 104 | 184917 | G | C | 184725 | A | Y | 184895 | A | null | Yes | NS, NC | P96833 | — |
| 105 | 188267 | T | T | 188075 | G | P | 188245 | G | P | Yes | NS, NC | O53642 | — |
| 106 | 189999 | T | T | 189807 | C | A | 189977 | C | A | Yes | NS, NC | O86360 | — |
| 107 | 190284 | T | T | 190092 | C | A | 190262 | C | A | Yes | NS, NC | O86360 | — |
| 108 | 192177 | A | L | 191985 | G | L | 192156 | G | L | Yes | S, NULL | Null | — |
| 109 | 195552 | C | A | 195358 | T | V | 195529 | T | V | Yes | NS, C | O07411 | enzyme activity |
| 110 | 195758 | G | A | 195564 | T | S | 195735 | T | S | Yes | NS, NC | O07411 | enzyme activity |
| 111 | 198328 | A | I | 198134 | C | I | 198305 | C | I | Yes | S, NULL | Null | — |
| 112 | 199662 | G | A | 199468 | T | S | 199639 | T | S | Yes | NS, NC | P72013 | pathogenesis |
| 113 | 199800 | T | S | 199606 | C | P | 199777 | C | P | Yes | NS, NC | P72013 | pathogenesis |
| 114 | 200622 | C | T | 200428 | T | I | 200599 | T | I | Yes | NS, NC | O07414 | pathogenesis |
| 115 | 201759 | C | D | 201565 | G | E | 201736 | G | E | Yes | NS, C | O07415 | pathogenesis |
| 116 | 206673 | G | P | 206479 | C | P | 206650 | C | P | Yes | S, NULL | Null | — |
| 117 | 206676 | T | G | 206482 | G | G | 206653 | G | G | Yes | S, NULL | Null | — |
| 118 | 210634 | T | H | 210440 | C | R | 210554 | C | R | Yes | NS, NC | O07423 | — |
| 119 | 212446 | A | Null | 212252 | G | Null | 212366 | G | null | No | nc, NULL | Null | — |
| 120 | 217393 | C | N | 217199 | T | N | 217313 | T | N | Yes | S, NULL | Null | — |
| 121 | 218055 | G | R | 217861 | C | P | 217975 | C | P | Yes | NS, NC | O07430 | hydrolase activity |
| 122 | 225861 | T | S | 225666 | C | G | 225780 | C | G | Yes | NS, NC | O07437 | — |
| 123 | 227215 | G | V | 227020 | A | I | 227134 | A | I | Yes | NS, C | O53645 | nucleotide binding |
| | | | | | | | | | | | | | activity |
| 124 | 227738 | T | M | 227543 | C | T | 227657 | C | T | Yes | NS, NC | O53645 | nucleotide binding |
| | | | | | | | | | | | | | activity |
| 125 | 228053 | T | L | 227858 | C | P | 227972 | C | P | Yes | NS, NC | O53645 | nucleotide binding |
| | | | | | | | | | | | | | activity |
| 126 | 228924 | T | R | 228729 | C | R | 228843 | C | R | Yes | S, NULL | Null | — |
| 127 | 231783 | C | Null | 231587 | T | Null | 231701 | T | null | No | nc, NULL | Null | — |
| 128 | 232188 | G | A | 231992 | C | A | 232106 | C | A | Yes | S, NULL | Null | — |
| 129 | 233552 | C | V | 233356 | A | V | 233470 | A | V | Yes | S, NULL | Null | — |
| 130 | 233558 | C | S | 233362 | G | R | 233476 | G | R | Yes | NS, NC | O53648 | — |
| 131 | 243794 | G | R | 243596 | A | H | 243712 | A | H | Yes | NS, NC | O53656 | integral to membrane |
| 132 | 244589 | C | A | 244391 | T | V | 244507 | T | V | Yes | NS, C | O53656 | integral to membrane |
| 133 | 246117 | C | E | 245919 | G | D | 246035 | G | D | Yes | NS, C | O53657 | membrane |
| 134 | 246365 | T | I | 246167 | A | F | 246283 | A | F | Yes | NS, NC | O53657 | membrane |
| 135 | 249718 | C | A | 249520 | T | V | 249636 | T | V | Yes | NS, C | P96391 | — |
| 136 | 251771 | A | T | 251573 | G | A | 251689 | G | A | Yes | NS, NC | P96392 | — |
| 137 | 251865 | C | Null | 251667 | T | Null | 251783 | T | null | No | nc, NULL | Null | — |
| 138 | 256378 | C | A | 256180 | G | G | 256296 | G | G | Yes | NS, C | P96396 | enzyme activity |
| 139 | 259127 | A | Null | 258900 | C | Null | 259016 | C | null | Yes | nc, NULL | Null | — |
| 140 | 260507 | T | T | 260280 | G | P | 260396 | G | P | Yes | NS, NC | P96399 | enzyme activity |
| 141 | 262385 | A | N | 262158 | G | D | 262274 | G | D | Yes | NS, NC | P96400 | electron transport |
| 142 | 265183 | A | D | 266857 | G | D | 266973 | G | D | Yes | S, NULL | Null | — |
| 143 | 265653 | A | S | 267327 | G | P | 267443 | G | P | Yes | NS, NC | P96405 | metabolism |
| 144 | 266601 | C | L | 268275 | G | F | 268391 | G | F | Yes | NS, NC | P96406 | S-adenosylmethionine- |
| | | | | | | | | | | | | | dependent |
| | | | | | | | | | | | | | methyltransferase |
| | | | | | | | | | | | | | activity |
| 145 | 269989 | T | N | 271663 | C | S | 271779 | C | S | Yes | NS, C | P96409 | — |
| 146 | 271077 | C | R | 272751 | G | S | 272867 | G | S | Yes | NS, NC | P96409 | — |
| 147 | 271882 | G | S | 273556 | C | S | 273672 | C | S | Yes | S, NULL | Null | — |
| 148 | 273691 | T | E | 275365 | G | D | 275481 | G | D | Yes | NS, C | P96413 | zinc ion binding activity |
| 149 | 276186 | T | Null | 277860 | G | Null | 277976 | G | null | No | nc, NULL | Null | — |
| 150 | 282208 | C | A | 283882 | T | T | 283998 | T | T | Yes | NS, NC | P96419 | cell adhesion |
| 151 | 283942 | C | V | 285616 | T | M | 285732 | T | M | Yes | NS, NC | P96419 | cell adhesion |
| 152 | 285894 | T | L | 287568 | G | V | 287684 | G | V | Yes | NS, C | O53660 | hydrolase activity |
| 153 | 287276 | T | T | 288950 | C | T | 289066 | C | T | Yes | S, NULL | Null | — |
| 154 | 287759 | T | S | 289433 | G | A | 289549 | G | A | Yes | NS, NC | O53663 | — |
| 155 | 288778 | T | L | 290452 | C | L | 290568 | C | L | Yes | S, NULL | Null | — |
| 156 | 292523 | G | A | 294196 | T | E | 294313 | T | E | Yes | NS, NC | O53666 | acyl-CoA |
| | | | | | | | | | | | | | dehydrogenase activity |
| 157 | 292778 | C | R | 294451 | T | K | 294568 | T | K | Yes | NS, C | O53666 | acyl-CoA |
| | | | | | | | | | | | | | dehydrogenase activity |
| 158 | 294180 | C | Null | 295853 | A | Null | 295970 | A | null | No | nc, NULL | Null | — |
| 159 | 295519 | T | V | 297192 | C | A | 297309 | C | A | Yes | NS, C | O53668 | — |
| 160 | 300012 | T | Null | 301685 | C | Null | 301802 | C | null | No | nc, NULL | Null | — |
| 161 | 301364 | T | G | 303037 | C | G | 303154 | C | G | Yes | S, NULL | Null | — |
| 162 | 305428 | T | G | 307101 | C | G | 307218 | C | G | Yes | S, NULL | Null | — |
| 163 | 308090 | T | Null | 309763 | C | Null | 309880 | C | null | Yes | nc, NULL | Null | — |
| 164 | 311176 | A | L | 312849 | G | L | 312966 | G | L | Yes | S, NULL | Null | — |
| 165 | 312194 | A | S | 313867 | G | S | 313984 | G | S | Yes | S, NULL | Null | — |
| 166 | 318505 | G | I | 320178 | A | I | 320294 | A | null | Yes | S, NULL | Null | — |
| 167 | 321009 | T | L | 322682 | C | L | 322798 | C | L | Yes | S, NULL | Null | — |
| 168 | 321631 | G | Null | 323304 | A | Null | 323420 | A | null | No | nc, NULL | Null | — |
| 169 | 323830 | C | V | 325503 | T | V | 325619 | T | V | Yes | S, NULL | Null | — |
| 170 | 327543 | A | L | 329216 | G | P | 329332 | G | P | Yes | NS, NC | P95229 | — |
| 171 | 329913 | A | L | 331586 | G | S | 331702 | G | S | Yes | NS, NC | O53681 | — |
| 172 | 331537 | C | Null | 333210 | G | Null | 333326 | G | null | Yes | nc, NULL | Null | — |
| 173 | 331617 | G | Null | 333290 | A | Null | 333406 | A | null | Yes | nc, NULL | Null | — |
| 174 | 331719 | G | Null | 333392 | C | Null | 333508 | C | null | No | nc, NULL | Null | — |
| 175 | 340088 | G | Null | 339084 | A | Null | 339148 | A | null | No | nc, NULL | Null | — |
| 176 | 340090 | C | Null | 339086 | T | Null | 339150 | T | null | No | nc, NULL | Null | — |
| 177 | 340091 | G | Null | 339087 | A | Null | 339151 | A | null | No | nc, NULL | Null | — |
| 178 | 340092 | G | Null | 339088 | C | Null | 339152 | C | null | No | nc, NULL | Null | — |
| 179 | 340097 | C | Null | 339093 | G | Null | 339157 | G | null | No | nc, NULL | Null | — |
| 180 | 343148 | C | A | 342144 | A | E | 342208 | A | null | Yes | NS, NC | O53687 | nuoleotide binding |
| | | | | | | | | | | | | | activity |
| 181 | 344283 | C | A | 343279 | G | A | 343343 | G | A | Yes | S, NULL | Null | — |
| 182 | 351491 | C | A | 350487 | G | A | 350551 | G | A | Yes | S, NULL | Null | — |
| 183 | 355282 | A | T | 354278 | G | A | 354342 | G | A | Yes | NS, NC | O86362 | — |
| 184 | 362163 | C | Null | 361159 | T | Null | 361223 | T | null | No | nc, NULL | Null | — |
| 185 | 362818 | T | F | 361814 | C | F | 361878 | C | F | Yes | S, NULL | Null | — |
| 186 | 364560 | A | N | 363511 | G | S | 363575 | G | null | Yes | NS, C | O07226 | — |
| 187 | 364804 | T | V | 363755 | C | V | 363819 | C | V | Yes | S, NULL | Null | — |
| 188 | 366022 | T | V | 364973 | C | A | 365037 | C | A | Yes | NS, C | O07229 | DNA binding activity |
| 189 | 367778 | C | A | 366729 | T | T | 366793 | T | T | Yes | NS, NC | O07231 | tRNA ligase activity |
| 190 | 368518 | A | F | 367469 | G | S | 367533 | G | S | Yes | NS, NC | O07231 | tRNA ligase activity |
| 191 | 369200 | T | S | 368166 | C | G | 368230 | C | G | Yes | NS, NC | O07231 | tRNA ligase activity |
| 192 | 373180 | A | L | 372147 | G | L | 372211 | G | L | Yes | S, NULL | Null | — |
| 193 | 382060 | G | G | 381028 | A | S | 381091 | A | S | Yes | NS, NC | O07239 | — |
| 194 | 383273 | T | L | 382241 | C | P | 382304 | C | P | Yes | NS, NC | O07239 | — |
| 195 | 383519 | T | Null | 382487 | C | Null | 382550 | C | null | No | nc, NULL | Null | — |
| 196 | 384021 | G | A | 382989 | A | V | 383052 | A | V | Yes | NS, C | O07241 | — |
| 197 | 387090 | C | Null | 386058 | T | Null | 386120 | T | null | No | nc, NULL | Null | — |
| 198 | 390159 | G | C | 389127 | A | Y | 389189 | A | Y | Yes | NS, NC | O07247 | dCTP deaminase |
| | | | | | | | | | | | | | activity |
| 199 | 393291 | C | Q | 392259 | T | * | 392321 | T | * | Yes | NS, TP | O07250 | — |
| 200 | 393536 | G | G | 392504 | A | G | 392566 | A | G | Yes | S, NULL | Null | — |
| 201 | 394778 | A | Y | 393746 | G | H | 393808 | G | H | Yes | NS, C | O08447 | monooxygenase activity |
| 202 | 395965 | G | S | 394933 | C | W | 394995 | C | W | Yes | NS, NC | O07253 | methyltransferase |
| | | | | | | | | | | | | | activity |
| 203 | 398416 | T | Null | 397384 | C | Null | 397446 | C | null | No | nc, NULL | Null | — |
| 204 | 399064 | G | G | 398032 | A | E | 398094 | A | G | Yes | NS, NC | O07256 | — |
| 205 | 402708 | A | H | 401676 | C | P | 401738 | C | P | Yes | NS, NC | O33266 | nucleic acid binding |
| | | | | | | | | | | | | | activity |
| 206 | 406818 | A | V | 405786 | C | V | 405848 | C | V | Yes | S, NULL | Null | — |
| 207 | 406884 | G | Null | 405852 | C | Null | 405914 | C | null | No | nc, NULL | Null | — |
| 208 | 412130 | G | S | 411098 | A | N | 411160 | A | N | Yes | NS, C | O06293 | — |
| 209 | 413310 | G | Q | 412278 | T | H | 412340 | T | H | Yes | NS, NC | O06293 | — |
| 210 | 423408 | T | L | 422377 | C | S | 422439 | C | S | Yes | NS, NC | P32724 | chaperone activity |
| 211 | 423774 | C | G | 422743 | T | G | 422805 | T | G | Yes | S, NULL | Null | — |
| 212 | 425964 | A | F | 424930 | T | I | 425095 | T | I | Yes | NS, NC | O06304 | — |
| 213 | 428488 | G | G | 427469 | T | G | 427619 | T | G | Yes | S, NULL | Null | — |
| 214 | 429715 | T | A | 428696 | C | A | 428786 | C | A | Yes | S, NULL | Null | — |
| 215 | 430077 | C | D | 429058 | T | N | 429148 | T | N | Yes | NS, NC | O06304 | — |
| 216 | 438482 | C | S | 437463 | G | S | 437553 | G | S | Yes | S, NULL | Null | — |
| 217 | 439288 | A | T | 438269 | G | A | 438359 | G | A | Yes | NS, NC | O06309 | metalloendopeptidase |
| | | | | | | | | | | | | | activity |
| 218 | 441762 | C | A | 440743 | T | V | 440833 | T | V | Yes | NS, C | O06312 | cation transport |
| 219 | 443988 | C | L | 442969 | A | I | 443059 | A | I | Yes | NS, C | O06314 | molecular_function |
| | | | | | | | | | | | | | unknown |
| 220 | 444576 | A | V | 443557 | C | V | 443647 | C | V | Yes | S, NULL | Null | — |
| 221 | 446432 | T | S | 445413 | C | G | 445503 | C | G | Yes | NS, NC | O53703 | transporter activity |
| 222 | 446797 | T | H | 445778 | C | R | 445868 | C | R | Yes | NS, NC | O53703 | transporter activity |
| 223 | 448459 | T | E | 447440 | C | G | 447530 | C | G | Yes | NS, NC | O53705 | nucleotide binding |
| | | | | | | | | | | | | | activity |
| 224 | 449922 | T | S | 448903 | C | G | 448993 | C | G | Yes | NS, NC | O53707 | — |
| 225 | 451132 | T | S | 450113 | C | S | 450203 | C | S | Yes | S, NULL | Null | — |
| 226 | 452456 | G | S | 451437 | A | F | 451527 | A | F | Yes | NS, NC | O53708 | electron transport |
| 227 | 452844 | T | A | 451825 | C | A | 451915 | C | A | Yes | S, NULL | Null | — |
| 228 | 456342 | G | R | 455323 | C | P | 455414 | C | P | Yes | NS, NC | O53712 | DNA binding activity |
| 229 | 456346 | C | G | 455327 | T | G | 455418 | T | G | Yes | S, NULL | Null | — |
| 230 | 467343 | C | R | 466324 | T | R | 466415 | T | R | Yes | S, NULL | Null | — |
| 231 | 467402 | C | A | 466383 | A | D | 466474 | A | D | Yes | NS, NC | O53720 | DNA binding activity |
| 232 | 469376 | G | G | 468355 | A | E | 468448 | A | E | Yes | NS, NC | P95197 | purine base |
| | | | | | | | | | | | | | biosynthesis |
| 233 | 470348 | C | T | 469327 | T | I | 469420 | T | I | Yes | NS, NC | P95197 | purine base |
| | | | | | | | | | | | | | biosynthesis |
| 234 | 472937 | G | A | 471916 | A | V | 472009 | A | V | Yes | NS, C | P95200 | electron transport |
| 235 | 474708 | A | A | 473687 | G | A | 473780 | G | A | Yes | S, NULL | Null | — |
| 236 | 476885 | G | T | 475864 | C | T | 475957 | C | T | Yes | S, NULL | Null | — |
| 237 | 482898 | G | P | 481878 | A | L | 481971 | A | L | Yes | NS, NC | P95211 | membrane |
| 238 | 485256 | G | A | 484236 | A | T | 485687 | A | T | Yes | NS, NC | P95213 | enzyme activity |
| 239 | 488897 | G | G | 487876 | T | G | 489327 | T | G | Yes | S, NULL | Null | — |
| 240 | 490019 | T | T | 488998 | C | T | 490449 | C | T | Yes | S, NULL | Null | — |
| 241 | 490878 | G | V | 489857 | A | M | 491308 | A | M | Yes | NS, NC | O86335 | enzyme activity |
| 242 | 492761 | C | F | 491740 | T | F | 493191 | T | F | Yes | S, NULL | Null | — |
| 243 | 493169 | C | A | 492148 | G | G | 493599 | G | G | Yes | NS, C | P96254 | metabolism |
| 244 | 495704 | C | R | 494683 | A | R | 496134 | A | R | Yes | S, NULL | Null | — |
| 245 | 498127 | T | P | 497106 | C | P | 498557 | C | P | Yes | S, NULL | Null | — |
| 246 | 499550 | G | A | 498529 | A | A | 499980 | A | A | Yes | S, NULL | Null | — |
| 247 | 502639 | T | V | 501618 | C | A | 503069 | C | A | Yes | NS, C | P96261 | electron transport |
| 248 | 506993 | A | T | 505972 | G | A | 507423 | G | A | Yes | NS, NC | P96265 | proteolysis and |
| | | | | | | | | | | | | | peptidolysis |
| 249 | 507929 | T | E | 506908 | C | G | 508359 | C | G | Yes | NS, NC | P96266 | — |
| 250 | 515676 | G | A | 514655 | T | E | 516106 | T | E | Yes | NS, NC | P96271 | ATP binding activity |
| 251 | 518377 | C | G | 517356 | T | D | 518807 | T | D | Yes | NS, NC | P96274 | — |
| 252 | 518430 | G | R | 517409 | A | R | 518860 | A | R | Yes | S, NULL | Null | — |
| 253 | 519412 | T | T | 518391 | C | A | 519842 | C | A | Yes | NS, NC | P96275 | protein biosynthesis |
| 254 | 520204 | G | G | 519183 | T | V | 520634 | T | V | Yes | NS, C | P96277 | — |
| 255 | 520350 | G | A | 519329 | A | T | 520780 | A | T | Yes | NS, NC | P96277 | — |
| 256 | 520825 | A | A | 519804 | G | A | 521255 | G | A | Yes | S, NULL | Null | — |
| 257 | 522338 | C | C | 521317 | T | C | 522768 | T | C | Yes | S, NULL | Null | — |
| 258 | 523100 | G | A | 522079 | A | T | 523530 | A | T | Yes | NS, NC | P96280 | ATP-dependent |
| | | | | | | | | | | | | | peptidase activity |
| 259 | 528335 | G | I | 527314 | C | M | 528765 | C | M | Yes | NS, NC | O53725 | Mo-molybdopterin |
| | | | | | | | | | | | | | cofactor biosynthesis |
| 260 | 529373 | A | Null | 528352 | C | Null | 529803 | C | null | Yes | nc, NULL | Null | — |
| 261 | 533211 | T | Null | 532190 | C | Null | 533641 | C | null | Yes | S, NULL | Null | — |
| 262 | 534258 | T | E | 533237 | C | G | 534688 | C | G | Yes | NS, NC | O53729 | — |
| 263 | 534489 | T | D | 533468 | C | G | 534919 | C | G | Yes | NS, NC | O53729 | — |
| 264 | 535446 | A | Null | 534425 | T | Null | 535876 | T | null | No | nc, NULL | Null | — |
| 265 | 540882 | G | S | 539861 | A | S | 541312 | A | S | Yes | S, NULL | Null | — |
| 266 | 540902 | G | L | 539881 | A | L | 541332 | A | L | Yes | S, NULL | Null | — |
| 267 | 541571 | T | T | 540550 | C | A | 542001 | C | A | Yes | NS, NC | O53735 | membrane |
| 268 | 544180 | C | Null | 543159 | T | Null | 544610 | T | null | No | nc, NULL | Null | — |
| 269 | 547376 | G | T | 546355 | A | T | 547806 | A | T | Yes | S, NULL | Null | — |
| 270 | 556349 | T | Q | 555328 | C | R | 556779 | C | R | Yes | NS, NC | O53750 | DNA binding activity |
| 271 | 557010 | G | R | 555989 | A | C | 557440 | A | C | Yes | NS, NC | O53750 | DNA binding activity |
| 272 | 557220 | C | D | 556199 | T | N | 557650 | T | N | Yes | NS, NC | O53750 | DNA binding activity |
| 273 | 558318 | A | Null | 557297 | G | Null | 558748 | G | null | No | nc, NULL | Null | — |
| 274 | 561876 | G | L | 560855 | C | L | 562305 | C | L | Yes | S, NULL | Null | — |
| 275 | 562317 | T | A | 561296 | C | A | 562746 | C | A | Yes | S, NULL | Null | — |
| 276 | 566174 | A | G | 565153 | C | G | 566603 | C | G | Yes | S, NULL | Null | — |
| 277 | 566423 | T | R | 565402 | G | R | 566852 | G | R | Yes | S, NULL | Null | — |
| 278 | 574240 | C | T | 573275 | G | T | 574725 | G | T | Yes | S, NULL | Null | — |
| 279 | 574347 | G | L | 573382 | T | I | 574832 | T | I | Yes | NS, C | Q11150 | metabolism |
| 280 | 582972 | A | F | 581819 | G | L | 583188 | G | L | Yes | NS, NC | Q11157 | electron transporter |
| | | | | | | | | | | | | | activity |
| 281 | 583372 | C | G | 582219 | T | G | 583588 | T | G | Yes | S, NULL | Null | — |
| 282 | 584969 | T | Q | 583816 | C | Q | 585186 | C | Q | Yes | S, NULL | Null | — |
| 283 | 585322 | C | G | 584169 | T | S | 585539 | T | S | Yes | NS, NC | Q11158 | — |
| 284 | 585662 | T | T | 584509 | G | T | 585879 | G | T | Yes | S, NULL | Null | — |
| 285 | 591914 | C | D | 590761 | G | E | 592131 | G | E | Yes | NS, C | Q11141 | pyrroline 5-carboxylate |
| | | | | | | | | | | | | | reductase activity |
| 286 | 598704 | C | H | 597551 | G | D | 598920 | G | D | Yes | NS, NC | Q11171 | membrane |
| 287 | 599874 | T | Y | 598721 | G | D | 600090 | G | D | Yes | NS, NC | Q11171 | membrane |
| 288 | 600514 | G | C | 599361 | C | S | 600730 | C | S | Yes | NS, NC | Q11171 | membrane |
| 289 | 601019 | G | R | 599866 | A | R | 601235 | A | R | Yes | S, NULL | Null | — |
| 290 | 606489 | G | G | 605336 | A | E | 606705 | A | E | Yes | NS, NC | O33357 | porphobilinogen |
| | | | | | | | | | | | | | synthase activity |
| 291 | 610514 | T | H | 609361 | C | H | 610730 | C | H | Yes | S, NULL | Null | — |
| 292 | 611077 | A | D | 609924 | G | G | 611293 | G | G | Yes | NS, NC | O33362 | transferase activity |
| 293 | 612523 | C | Q | 611371 | T | Q | 612740 | T | Q | Yes | S, NULL | Null | — |
| 294 | 622386 | C | S | 621234 | G | S | 622603 | G | S | Yes | S, NULL | Null | — |
| 295 | 624971 | T | G | 623726 | G | G | 625179 | G | G | Yes | S, NULL | Null | — |
| 296 | 625445 | T | G | 624200 | C | G | 625653 | C | G | Yes | S, NULL | Null | — |
| 297 | 631262 | G | Null | 630016 | A | Null | 631469 | A | null | No | nc, NULL | Null | — |
| 298 | 631931 | T | P | 630685 | G | P | 632138 | G | P | Yes | S, NULL | Null | — |
| 299 | 634973 | C | V | 633727 | T | I | 635181 | T | I | Yes | NS, C | O06407 | — |
| 300 | 641373 | T | Null | 640127 | C | Null | 641581 | C | null | No | nc, NULL | Null | — |
| 301 | 644245 | C | R | 643000 | G | R | 644454 | G | R | Yes | S, NULL | Null | — |
| 302 | 645682 | T | A | 644437 | C | A | 645891 | C | A | Yes | S, NULL | Null | — |
| 303 | 649910 | T | D | 648665 | C | D | 650119 | C | D | Yes | S, NULL | Null | — |
| 304 | 650099 | C | G | 648854 | T | G | 650308 | T | G | Yes | S, NULL | Null | — |
| 305 | 654178 | T | G | 652933 | C | G | 654387 | C | G | Yes | S, NULL | Null | — |
| 306 | 657229 | G | Null | 655984 | T | Null | 657438 | T | null | No | nc, NULL | Null | — |
| 307 | 658821 | G | D | 657576 | A | D | 659030 | A | D | Yes | S, NULL | Null | — |
| 308 | 660166 | G | L | 658921 | C | F | 660375 | C | F | Yes | NS, NC | O53764 | methyltransferase |
| | | | | | | | | | | | | | activity |
| 309 | 660584 | C | Null | 659339 | T | Null | 660793 | T | null | No | nc, NULL | Null | — |
| 310 | 664154 | C | A | 662909 | T | A | 664363 | T | A | Yes | S, NULL | Null | — |
| 311 | 668104 | G | F | 666860 | A | F | 668313 | A | F | Yes | S, NULL | Null | — |
| 312 | 669625 | C | K | 668381 | A | N | 669834 | A | N | Yes | NS, NC | O53771 | — |
| 313 | 671788 | A | H | 670543 | G | R | 671996 | G | R | Yes | NS, NC | O53773 | DNA binding activity |
| 314 | 673323 | A | P | 672078 | G | P | 673531 | G | P | Yes | S, NULL | Null | — |
| 315 | 673880 | T | T | 672635 | C | A | 674088 | C | A | Yes | NS, NC | O53775 | subtilase activity |
| 316 | 677219 | G | Null | 675974 | A | Null | 677427 | A | null | Yes | nc, NULL | Null | — |
| 317 | 680416 | C | Null | 679171 | T | Null | 680624 | T | null | No | nc, NULL | Null | — |
| 318 | 680740 | G | G | 679495 | A | D | 680948 | A | D | Yes | NS, NC | O86365 | nitrogen fixation |
| 319 | 685069 | T | I | 683824 | C | M | 685275 | C | I | Yes | NS, NC | O53781 | — |
| 320 | 685533 | G | Null | 684288 | A | Null | 685739 | A | null | Yes | nc, NULL | Null | — |
| 321 | 688596 | C | P | 687351 | T | L | 688802 | T | L | Yes | NS, NC | O07789 | pathogenesis |
| 322 | 690448 | T | M | 689202 | C | T | 690653 | C | T | Yes | NS, NC | O07787 | pathogenesis |
| 323 | 691492 | A | N | 690246 | C | T | 691695 | C | N | Yes | NS, C | O07787 | pathogenesis |
| 324 | 691694 | C | A | 690448 | A | A | 691888 | A | null | Yes | S, NULL | Null | — |
| 325 | 693833 | T | * | 692586 | C | Q | 694036 | C | Q | Yes | NS, TP | O07785 | pathogenesis |
| 326 | 700963 | T | I | 699716 | C | V | 701166 | C | V | Yes | NS, C | O07776 | two-component |
| | | | | | | | | | | | | | response regulator |
| | | | | | | | | | | | | | activity |
| 327 | 701329 | G | A | 700082 | C | P | 701532 | C | null | Yes | NS, NC | O07775 | — |
| 328 | 701386 | A | K | 700139 | G | E | 701589 | G | null | Yes | NS, NC | O07775 | — |
| 329 | 702021 | C | P | 700774 | T | S | 702224 | T | S | Yes | NS, NC | O07774 | — |
| 330 | 706847 | C | S | 705600 | T | N | 707048 | T | N | Yes | NS, C | O07767 | — |
| 331 | 712319 | T | A | 711072 | C | A | 712520 | C | A | Yes | S, NULL | Null | — |
| 332 | 713327 | G | G | 712080 | C | R | 713528 | C | null | Yes | NS, NC | O07759 | UTP-hexose-1- |
| | | | | | | | | | | | | | phosphate |
| | | | | | | | | | | | | | uridylyltransferase |
| | | | | | | | | | | | | | activity |
| 333 | 713374 | C | A | 712127 | G | A | 713575 | G | null | Yes | S, NULL | Null | — |
| 334 | 714556 | C | R | 713308 | T | C | 714756 | T | C | Yes | NS, NC | P96910 | galactokinase activity |
| 335 | 715048 | T | C | 713800 | C | R | 715248 | C | R | Yes | NS, NC | P96910 | galactokinase activity |
| 336 | 716512 | G | W | 715264 | A | Null | 716712 | A | W | Yes | nc, NULL | Null | — |
| 337 | 718834 | G | V | 717586 | A | V | 719034 | A | V | Yes | S, NULL | Null | — |
| 338 | 720904 | T | V | 719656 | C | V | 721104 | C | V | Yes | S, NULL | Null | — |
| 339 | 721373 | C | A | 720125 | T | T | 721573 | T | T | Yes | NS, NC | P96919 | RNA binding activity |
| 340 | 722454 | T | G | 721206 | C | G | 722654 | C | G | Yes | S, NULL | Null | — |
| 341 | 723170 | G | F | 721922 | A | F | 723370 | A | F | Yes | S, NULL | Null | — |
| 342 | 723828 | A | F | 722581 | C | V | 724029 | C | V | Yes | NS, NC | P96920 | DNA binding activity |
| 343 | 726039 | A | L | 724792 | C | V | 726240 | C | V | Yes | NS, C | P96920 | DNA binding activity |
| 344 | 726979 | A | L | 725732 | G | P | 727180 | G | P | Yes | NS, NC | P96921 | helicase activity |
| 345 | 728566 | T | E | 727319 | C | G | 728767 | C | G | Yes | NS, NC | P96921 | helicase activity |
| 346 | 730359 | A | G | 729112 | G | G | 730559 | G | G | Yes | S, NULL | Null | — |
| 347 | 733788 | G | A | 732550 | A | T | 733997 | A | T | Yes | NS, NC | P96927 | cysteine-type |
| | | | | | | | | | | | | | endopeptidase activity |
| 348 | 737101 | G | A | 735863 | A | T | 737310 | A | T | Yes | NS, NC | P96932 | RNA binding activity |
| 349 | 737549 | T | P | 736311 | C | P | 737753 | C | P | Yes | S, NULL | Null | — |
| 350 | 738155 | T | L | 736917 | G | F | 738359 | G | F | Yes | NS, NC | P72028 | methyltransferase |
| | | | | | | | | | | | | | activity |
| 351 | 740056 | A | L | 738818 | C | R | 740260 | C | R | Yes | NS, NC | P72026 | methyltransferase |
| | | | | | | | | | | | | | activity |
| 352 | 742977 | T | T | 741739 | C | A | 743181 | C | A | Yes | NS, NC | P96936 | — |
| 353 | 745086 | T | L | 743315 | C | S | 745290 | C | S | Yes | NS, NC | P96937 | alpha-mannosidase |
| | | | | | | | | | | | | | activity |
| 354 | 746998 | A | P | 745227 | G | P | 747202 | G | P | Yes | S, NULL | Null | — |
| 355 | 747114 | G | R | 745343 | C | P | 747318 | C | P | Yes | NS, NC | P96937 | alpha-mannosidase |
| | | | | | | | | | | | | | activity |
| 356 | 758951 | G | G | 757180 | A | D | 759155 | A | D | Yes | NS, NC | O06776 | metabolism |
| 357 | 764800 | C | A | 763029 | T | A | 765004 | T | A | Yes | S, NULL | Null | — |
| 358 | 770931 | G | P | 769160 | A | S | 771136 | A | null | Yes | NS, NC | O06769 | — |
| 359 | 771448 | C | Null | 769677 | A | Null | 771653 | A | null | No | nc, NULL | Null | — |
| 360 | 772157 | A | A | 770386 | G | A | 772362 | G | A | Yes | S, NULL | Null | — |
| 361 | 774665 | A | L | 772894 | G | L | 774870 | G | L | Yes | S, NULL | Null | — |
| 362 | 777869 | A | I | 776098 | G | T | 778074 | G | T | Yes | NS, NC | O53784 | membrane |
| 363 | 784766 | A | A | 782995 | G | A | 784971 | G | A | Yes | S, NULL | Null | — |
| 364 | 788162 | G | S | 786391 | T | I | 788367 | T | I | Yes | NS, NC | P95032 | — |
| 365 | 800584 | T | Null | 798813 | C | Null | 800788 | C | null | No | nc, NULL | Null | — |
| 366 | 804997 | T | G | 803173 | C | G | 805364 | C | G | Yes | S, NULL | Null | — |
| 367 | 808276 | T | L | 806452 | G | L | 808643 | G | L | Yes | S, NULL | Null | — |
| 368 | 808601 | T | * | 806777 | G | E | 808968 | G | E | Yes | NS, TP | P95059 | metabolism |
| 369 | 811737 | C | Null | 809913 | A | Null | 812104 | A | null | No | nc, NULL | Null | — |
| 370 | 812709 | G | Null | 810885 | A | Null | 813076 | A | null | No | nc, NULL | Null | — |
| 371 | 816925 | T | R | 815101 | C | R | 817293 | C | R | Yes | S, NULL | Null | — |
| 372 | 817058 | C | T | 815234 | T | I | 817426 | T | I | Yes | NS, NC | P95071 | structural constituent of |
| | | | | | | | | | | | | | ribosome |
| 373 | 817673 | G | R | 815849 | A | R | 818041 | A | null | Yes | S, NULL | Null | — |
| 374 | 822574 | T | H | 820750 | C | R | 822942 | C | R | Yes | NS, NC | O86322 | serine biosynthesis |
| 375 | 823729 | C | P | 821905 | T | L | 824097 | T | L | Yes | NS, NC | O53793 | carbohydrate |
| | | | | | | | | | | | | | metabolism |
| 376 | 828003 | C | L | 826179 | G | L | 828371 | G | L | Yes | S, NULL | Null | — |
| 377 | 833390 | G | V | 831564 | A | M | 833756 | A | M | Yes | NS, NC | O53802 | — |
| 378 | 834025 | T | D | 832199 | C | D | 834390 | C | D | Yes | S, NULL | Null | — |
| 379 | 834070 | G | Q | 832244 | A | Q | 834435 | A | Q | Yes | S, NULL | Null | — |
| 380 | 836836 | T | Null | 835010 | A | Null | 837201 | A | null | No | nc, NULL | Null | — |
| 381 | 837652 | T | V | 835826 | C | A | 838017 | C | A | Yes | NS, C | O53809 | — |
| 382 | 839308 | A | N | 837578 | G | S | 839769 | G | S | Yes | NS, C | O53809 | — |
| 383 | 846049 | C | V | 843857 | T | I | 846000 | T | I | Yes | NS, C | O53815 | acyl-CoA |
| | | | | | | | | | | | | | dehydrogenase activity |
| 384 | 846399 | G | A | 844207 | A | V | 846350 | A | V | Yes | NS, C | O53815 | acyl-OcA |
| | | | | | | | | | | | | | dehydrogenase activity |
| 385 | 846819 | C | G | 844627 | A | V | 846770 | A | V | Yes | NS, C | O53816 | metabolism |
| 386 | 850185 | C | Null | 847993 | T | Null | 850136 | T | null | No | nc, NULL | Null | — |
| 387 | 850597 | T | K | 848405 | C | R | 850548 | C | R | Yes | NS, C | O53818 | — |
| 388 | 853294 | T | A | 851102 | C | A | 853245 | C | A | Yes | S, NULL | Null | — |
| 389 | 853752 | A | Null | 851560 | G | Null | 853703 | G | null | No | nc, NULL | Null | — |
| 390 | 854796 | A | I | 852604 | G | I | 854747 | G | I | Yes | S, NULL | Null | — |
| 391 | 854797 | T | I | 852605 | G | I | 854748 | G | I | Yes | S, NULL | Null | — |
| 392 | 856687 | A | F | 854496 | G | F | 856638 | G | F | Yes | S, NULL | Null | — |
| 393 | 864764 | T | V | 862573 | C | A | 864715 | C | A | Yes | NS, C | P71824 | metabolism |
| 394 | 865821 | G | G | 863630 | T | V | 865772 | T | V | Yes | NS, C | P71825 | valine metabolism |
| 395 | 869886 | C | A | 867695 | A | S | 869837 | A | S | Yes | NS, NC | P71829 | enzyme activity |
| 396 | 870116 | G | A | 867925 | T | D | 870067 | T | D | Yes | NS, NC | P71829 | enzyme activity |
| 397 | 870460 | C | A | 868269 | T | A | 870411 | T | A | Yes | S, NULL | Null | — |
| 398 | 873460 | C | P | 871269 | A | T | 873411 | A | T | Yes | NS, NC | P71832 | enzyme activity |
| 399 | 879911 | A | L | 877718 | G | L | 879862 | G | L | Yes | S, NULL | Null | — |
| 400 | 879912 | A | G | 877719 | G | G | 879863 | G | G | Yes | S, NULL | Null | — |
| 401 | 895718 | C | S | 894886 | T | S | 894797 | T | null | Yes | S, NULL | Null | — |
| 402 | 901045 | G | R | 900213 | C | R | 900124 | C | R | Yes | S, NULL | Null | — |
| 403 | 904341 | G | V | 903509 | C | V | 903420 | C | V | Yes | S, NULL | Null | — |
| 404 | 905912 | C | G | 905080 | G | G | 904991 | G | G | Yes | S, NULL | Null | — |
| 405 | 912091 | C | P | 911259 | T | L | 911170 | T | L | Yes | NS, NC | O53830 | two-component |
| | | | | | | | | | | | | | response regulator |
| | | | | | | | | | | | | | activity |
| 406 | 913660 | G | L | 912828 | C | F | 912739 | C | F | Yes | NS, NC | O53832 | nucleotide binding |
| | | | | | | | | | | | | | activity |
| 407 | 914104 | G | S | 913272 | C | S | 913183 | C | S | Yes | S, NULL | Null | — |
| 408 | 916876 | G | P | 916044 | T | H | 915955 | T | H | Yes | NS, NC | O53834 | — |
| 409 | 917180 | A | Null | 916348 | G | Null | 916259 | G | null | No | nc, NULL | Null | — |
| 410 | 917489 | G | L | 916657 | A | F | 916568 | A | F | Yes | NS, NC | O53835 | molecular_function |
| | | | | | | | | | | | | | unknown |
| 411 | 917544 | T | L | 916712 | G | L | 916623 | G | L | Yes | S, NULL | Null | — |
| 412 | 918089 | A | C | 917257 | C | G | 917168 | C | G | Yes | NS, NC | O53835 | molecular_function |
| | | | | | | | | | | | | | unknown |
| 413 | 919629 | C | Null | 918797 | T | Null | 918708 | T | null | No | nc, NULL | Null | — |
| 414 | 920661 | T | R | 919829 | C | R | 919740 | C | R | Yes | S, NULL | Null | — |
| 415 | 920753 | G | G | 919921 | A | E | 919832 | A | E | Yes | NS, NC | O53837 | — |
| 416 | 921344 | A | Q | 920512 | G | R | 920423 | G | R | Yes | NS, NC | O53837 | — |
| 417 | 925130 | A | Null | 924298 | G | Null | 924209 | G | null | No | nc, NULL | Null | — |
| 418 | 928734 | C | Null | 927830 | T | Null | 927741 | T | null | No | nc, NULL | Null | — |
| 419 | 929147 | T | G | 928396 | G | G | 928298 | G | G | Yes | S, NULL | Null | — |
| 420 | 930497 | T | A | 929746 | C | A | 929648 | C | A | Yes | S, NULL | Null | — |
| 421 | 931872 | C | Y | 931121 | T | Y | 931023 | T | Y | Yes | S, NULL | Null | — |
| 422 | 932186 | G | G | 931435 | A | D | 931337 | A | D | Yes | NS, NC | O53846 | — |
| 423 | 933001 | A | P | 932250 | C | Null | 932152 | C | null | Yes | nc, NULL | Null | — |
| 424 | 933029 | C | W | 932278 | T | * | 932180 | T | * | Yes | NS, TP | O53848 | — |
| 425 | 934448 | T | G | 933697 | G | G | 933599 | G | G | Yes | S, NULL | Null | — |
| 426 | 934979 | G | Null | 934228 | C | Null | 934130 | C | null | No | nc, NULL | Null | — |
| 427 | 934982 | A | Null | 934231 | G | Null | 934133 | G | null | No | nc, NULL | Null | — |
| 428 | 935360 | T | Null | 934609 | G | Null | 934511 | G | null | No | nc, NULL | Null | — |
| 429 | 938432 | T | F | 937675 | G | F | 937577 | G | V | Yes | S, NULL | Null | — |
| 430 | 939001 | G | L | 938244 | A | L | 938146 | A | L | Yes | S, NULL | Null | — |
| 431 | 940714 | G | G | 939957 | A | D | 939859 | A | D | Yes | NS, NC | O53855 | metabolism |
| 432 | 941068 | A | D | 940311 | C | A | 940213 | C | A | Yes | NS, NC | O53855 | metabolism |
| 433 | 941645 | G | P | 940888 | C | A | 940790 | C | A | Yes | NS, NC | O53856 | two-component |
| | | | | | | | | | | | | | response regulator |
| | | | | | | | | | | | | | activity |
| 434 | 942600 | A | E | 941843 | C | A | 941745 | C | A | Yes | NS, NC | O53857 | ATP binding activity |
| 435 | 943719 | G | H | 942962 | A | Y | 942864 | A | Y | Yes | NS, C | O53858 | copper ion binding |
| | | | | | | | | | | | | | activity |
| 436 | 945051 | G | Null | 944294 | A | Null | 944196 | A | null | No | nc, NULL | Null | — |
| 437 | 945480 | T | V | 944723 | C | A | 944625 | C | A | Yes | NS, C | O53859 | — |
| 438 | 946102 | G | G | 945345 | T | V | 945247 | T | null | Yes | NS, C | O53860 | amino acid metabolism |
| 439 | 948022 | T | F | 947265 | C | F | 947165 | C | null | Yes | S, NULL | Null | — |
| 440 | 948049 | C | G | 947292 | T | G | 947192 | T | null | Yes | S, NULL | Null | — |
| 441 | 948974 | A | F | 948217 | C | V | 948117 | C | V | Yes | NS, NC | O53863 | metabolism |
| 442 | 949049 | C | G | 948292 | T | S | 948192 | T | S | Yes | NS, NC | O53863 | metabolism |
| 443 | 951897 | A | Null | 951140 | C | Null | 951040 | C | null | No | nc, NULL | Null | — |
| 444 | 953517 | C | Null | 952760 | G | Null | 952660 | G | null | No | nc, NULL | Null | — |
| 445 | 958717 | A | L | 957961 | G | L | 957861 | G | L | Yes | S, NULL | Null | — |
| 446 | 959147 | A | T | 958391 | G | A | 958291 | G | A | Yes | NS, NC | O53872 | enzyme activity |
| 447 | 960133 | G | A | 959377 | A | V | 959277 | A | V | Yes | NS, C | O53873 | nucleic acid binding |
| | | | | | | | | | | | | | activity |
| 448 | 961068 | G | S | 960365 | A | L | 960371 | A | L | Yes | NS, NC | O53874 | — |
| 449 | 967989 | T | S | 967527 | C | G | 967533 | C | G | Yes | NS, NC | O53882 | — |
| 450 | 970372 | A | L | 969904 | G | L | 969919 | G | L | Yes | S, NULL | Null | — |
| 451 | 972368 | A | G | 971900 | G | G | 971915 | G | G | Yes | S, NULL | Null | — |
| 452 | 974604 | G | L | 974136 | A | L | 974150 | A | L | Yes | S, NULL | Null | — |
| 453 | 976327 | C | G | 975859 | T | D | 975873 | T | D | Yes | NS, NC | Q10564 | integral to membrane |
| 454 | 997447 | G | A | 996980 | A | A | 996994 | A | A | Yes | S, NULL | Null | — |
| 455 | 998183 | C | Null | 997716 | G | Null | 997730 | G | null | No | nc, NULL | Null | — |
| 456 | 1001197 | G | A | 1000730 | A | T | 1000744 | A | T | Yes | NS, NC | Q10530 | enzyme activity |
| 457 | 1009407 | C | Null | 1008940 | T | Null | 1008954 | T | null | No | nc, NULL | Null | — |
| 458 | 1010182 | T | G | 1009715 | C | G | 1009729 | C | G | Yes | S, NULL | Null | — |
| 459 | 1010422 | A | L | 1009955 | G | L | 1009969 | G | L | Yes | S, NULL | Null | — |
| 460 | 1011566 | T | L | 1011098 | C | P | 1011113 | C | P | Yes | NS, NC | O05900 | — |
| 461 | 1015281 | G | Q | 1014813 | T | H | 1014828 | T | H | Yes | NS, NC | O05901 | — |
| 462 | 1018494 | A | L | 1018026 | G | P | 1018041 | G | P | Yes | NS, NC | O05905 | — |
| 463 | 1024812 | G | G | 1024344 | A | S | 1024359 | A | S | Yes | NS, NC | O05910 | — |
| 464 | 1026536 | T | E | 1026068 | G | D | 1026083 | G | D | Yes | NS, C | O05912 | — |
| 465 | 1027911 | C | V | 1027443 | G | V | 1027458 | G | V | Yes | S, NULL | Null | — |
| 466 | 1030402 | G | R | 1029934 | A | R | 1029949 | A | R | Yes | S, NULL | Null | — |
| 467 | 1034703 | G | L | 1034236 | A | L | 1034251 | A | L | Yes | S, NULL | Null | — |
| 468 | 1041172 | C | A | 1040704 | A | S | 1040719 | A | S | Yes | NS, NC | O05870 | transporter activity |
| 469 | 1043636 | C | A | 1043167 | T | V | 1043182 | T | V | Yes | NS, C | P15712 | transporter activity |
| 470 | 1048294 | T | L | 1047825 | C | L | 1047840 | C | L | Yes | S, NULL | Null | — |
| 471 | 1054603 | T | T | 1054134 | C | T | 1054149 | C | T | Yes | S, NULL | Null | — |
| 472 | 1055251 | G | G | 1054782 | C | R | 1054797 | C | R | Yes | NS, NC | P71564 | metabolism |
| 473 | 1063212 | C | A | 1062743 | T | V | 1062758 | T | V | Yes | NS, C | P71559 | enzyme activity |
| 474 | 1064232 | A | K | 1063763 | G | R | 1063778 | G | R | Yes | NS, C | P71558 | enzyme activity |
| 475 | 1077356 | T | H | 1076915 | C | R | 1076930 | C | R | Yes | NS, NC | P71545 | — |
| 476 | 1077719 | C | G | 1077278 | A | W | 1077293 | A | W | Yes | NS, NC | P71544 | — |
| 477 | 1080631 | A | N | 1080190 | G | D | 1080205 | G | D | Yes | NS, NC | P77894 | magnesium ion binding |
| | | | | | | | | | | | | | activity |
| 478 | 1083482 | A | H | 1083041 | C | Q | 1083056 | C | Q | Yes | NS, NC | P71539 | acyl-CoA |
| | | | | | | | | | | | | | dehydrogenase activity |
| 479 | 1085532 | A | F | 1085091 | T | I | 1085106 | T | I | Yes | NS, NC | P71538 | ATP binding activity |
| 480 | 1096095 | T | T | 1095642 | C | A | 1095671 | C | A | Yes | NS, NC | O53893 | — |
| 481 | 1096129 | G | G | 1095676 | A | G | 1095705 | A | G | Yes | S, NULL | Null | — |
| 482 | 1096774 | T | Q | 1096321 | G | H | 1096362 | G | H | Yes | NS, NC | O53893 | — |
| 483 | 1097474 | A | S | 1097021 | G | G | 1097062 | G | G | Yes | NS, NC | O53894 | two-component |
| | | | | | | | | | | | | | response regulator |
| | | | | | | | | | | | | | activity |
| 484 | 1098974 | A | H | 1098521 | T | L | 1098562 | T | L | Yes | NS, NC | O53895 | two-component sensor |
| | | | | | | | | | | | | | molecule activity |
| 485 | 1102935 | T | L | 1102482 | G | V | 1102523 | G | V | Yes | NS, C | O53899 | nucleotide binding |
| | | | | | | | | | | | | | activity |
| 486 | 1103991 | T | G | 1103538 | C | G | 1103579 | C | G | Yes | S, NULL | Null | — |
| 487 | 1104263 | A | * | 1103810 | G | W | 1103851 | G | W | Yes | NS, TP | O53900 | membrane |
| 488 | 1105141 | G | V | 1104688 | T | F | 1104729 | T | F | Yes | NS, NC | O53900 | membrane |
| 489 | 1105524 | G | G | 1105071 | A | G | 1105112 | A | G | Yes | S, NULL | Null | — |
| 490 | 1105735 | A | I | 1105282 | G | V | 1105323 | G | V | Yes | NS, C | O86370 | — |
| 491 | 1105969 | G | D | 1105516 | T | Y | 1105557 | T | Y | Yes | NS, NC | O86370 | — |
| 492 | 1108391 | C | A | 1107938 | A | S | 1107979 | A | S | Yes | NS, NC | O05573 | — |
| 493 | 1109614 | G | I | 1109161 | C | M | 1109202 | C | M | Yes | NS, NC | O05575 | enzyme activity |
| 494 | 1111407 | G | G | 1110954 | T | C | 1110995 | T | C | Yes | NS, NC | O05577 | Mo-molybdopterin |
| | | | | | | | | | | | | | cofactor biosynthesis |
| 495 | 1113109 | G | G | 1112656 | A | D | 1112697 | A | D | Yes | NS, NC | O05579 | — |
| 496 | 1113741 | C | Q | 1113288 | G | E | 1113329 | G | E | Yes | NS, NC | O05579 | — |
| 497 | 1120048 | G | L | 1119595 | C | V | 1119635 | C | V | Yes | NS, C | O05586 | mannosyltransferase |
| | | | | | | | | | | | | | activity |
| 498 | 1124048 | G | S | 1123595 | A | L | 1123641 | A | L | Yes | NS, NC | O05591 | biosynthesis |
| 499 | 1124238 | G | S | 1123785 | A | N | 1123831 | A | S | Yes | NS, C | O05592 | — |
| 500 | 1125767 | T | S | 1125314 | C | P | 1125360 | C | P | Yes | NS, NC | O05592 | — |
| 501 | 1129386 | A | E | 1128933 | G | G | 1128979 | G | G | Yes | NS, NC | O05594 | — |
| 502 | 1129611 | T | V | 1129158 | C | A | 1129204 | C | A | Yes | NS, C | O05594 | — |
| 503 | 1131752 | A | N | 1131298 | G | S | 1131344 | G | null | Yes | NS, C | O05597 | — |
| 504 | 1137772 | G | Q | 1137323 | C | E | 1137369 | C | E | Yes | NS, NC | P96382 | UDP-N- |
| | | | | | | | | | | | | | acetylglucosamine |
| | | | | | | | | | | | | | pyrophosphorylase |
| | | | | | | | | | | | | | activity |
| 505 | 1138029 | C | G | 1137580 | T | E | 1137626 | T | E | Yes | NS, NC | P96382 | UDP-N- |
| | | | | | | | | | | | | | acetylglucosamine |
| | | | | | | | | | | | | | pyrophosphorylase |
| | | | | | | | | | | | | | activity |
| 506 | 1139461 | T | L | 1139012 | C | L | 1139058 | C | L | Yes | S, NULL | Null | — |
| 507 | 1144279 | C | P | 1143830 | A | T | 1143876 | A | T | Yes | NS, NC | P96378 | — |
| 508 | 1145032 | G | G | 1144583 | A | R | 1144629 | A | R | Yes | NS, NC | P96377 | phosphopyruvate |
| | | | | | | | | | | | | | hydratase complex |
| 509 | 1148706 | G | Null | 1148257 | A | Null | 1148303 | A | null | Yes | nc, NULL | Null | — |
| 510 | 1149575 | T | L | 1149126 | C | L | 1149172 | C | L | Yes | S, NULL | Null | — |
| 511 | 1151250 | T | D | 1150801 | C | G | 1150847 | C | G | Yes | NS, NC | P96372 | two-component sensor |
| | | | | | | | | | | | | | molecule activity |
| 512 | 1152153 | T | Null | 1151704 | C | Null | 1151750 | C | null | Yes | nc, NULL | Null | — |
| 513 | 1161217 | A | L | 1160768 | T | Q | 1160814 | T | Q | Yes | NS, NC | P96364 | — |
| 514 | 1164196 | A | Null | 1163747 | G | Null | 1163793 | G | null | Yes | nc, NULL | Null | — |
| 515 | 1164719 | T | Null | 1164270 | C | Null | 1164316 | C | null | Yes | nc, NULL | Null | — |
| 516 | 1165018 | G | Null | 1164569 | A | Null | 1164615 | A | null | No | nc, NULL | Null | — |
| 517 | 1165561 | T | N | 1165112 | C | D | 1165158 | C | null | Yes | NS, NC | P96360 | — |
| 518 | 1166468 | A | C | 1166018 | C | G | 1166065 | C | G | Yes | NS, NC | P96358 | serine-type |
| | | | | | | | | | | | | | endopeptidase activity |
| 519 | 1166960 | T | T | 1166510 | C | A | 1166557 | C | A | Yes | NS, NC | P96358 | serine-type |
| | | | | | | | | | | | | | endopeptidase activity |
| 520 | 1168430 | G | G | 1167980 | T | W | 1168027 | T | W | Yes | NS, NC | P96356 | — |
| 521 | 1169896 | A | T | 1169445 | G | A | 1169493 | G | A | Yes | NS, NC | P96354 | peroxidase activity |
| 522 | 1170414 | A | G | 1169963 | G | G | 1170011 | G | G | Yes | S, NULL | Null | — |
| 523 | 1171297 | A | Null | 1170846 | G | Null | 1170894 | G | null | Yes | nc, NULL | Null | — |
| 524 | 1175230 | A | Null | 1174780 | G | Null | 1174828 | G | null | No | nc, NULL | Null | — |
| 525 | 1177201 | C | Null | 1176751 | T | Null | 1176799 | T | null | Yes | nc, NULL | Null | — |
| 526 | 1179589 | G | Null | 1179139 | T | Null | 1179187 | T | null | No | nc, NULL | Null | — |
| 527 | 1189705 | T | M | 1189243 | C | V | 1189291 | C | V | Yes | NS, NC | O53415 | — |
| 528 | 1193177 | C | W | 1191815 | A | L | 1192055 | A | L | Yes | NS, NC | O53416 | — |
| 529 | 1193221 | C | E | 1191859 | T | E | 1192099 | T | E | Yes | S, NULL | Null | — |
| 530 | 1199501 | G | Null | 1198139 | A | Null | 1198376 | A | null | No | nc, NULL | Null | — |
| 531 | 1199502 | A | Null | 1198140 | C | Null | 1198377 | C | null | No | nc, NULL | Null | — |
| 532 | 1199636 | A | G | 1198274 | G | G | 1198511 | G | G | Yes | S, NULL | Null | — |
| 533 | 1205184 | C | T | 1203822 | T | I | 1204059 | T | I | Yes | NS, NC | O53426 | — |
| 534 | 1206868 | A | N | 1205506 | G | N | 1205743 | G | N | Yes | S, NULL | Null | — |
| 535 | 1212729 | C | R | 1211367 | A | S | 1211604 | A | S | Yes | NS, NC | O53434 | metabolism |
| 536 | 1214512 | T | G | 1213168 | C | G | 1213326 | C | null | Yes | S, NULL | Null | — |
| 537 | 1221942 | T | Null | 1220568 | G | Null | 1220117 | G | null | No | nc, NULL | Null | — |
| 538 | 1226570 | T | S | 1225196 | C | P | 1224745 | C | P | Yes | NS, NC | O53444 | carbohydrate |
| | | | | | | | | | | | | | metabolism |
| 539 | 1227449 | A | L | 1226075 | G | P | 1225624 | G | P | Yes | NS, NC | O53445 | — |
| 540 | 1230847 | G | D | 1229473 | T | E | 1229022 | T | E | Yes | NS, C | O53449 | integral to membrane |
| 541 | 1232149 | A | I | 1230776 | G | T | 1230325 | G | T | Yes | NS, NC | O53450 | DNA binding activity |
| 542 | 1236028 | A | D | 1234655 | G | D | 1234205 | G | D | Yes | S, NULL | Null | — |
| 543 | 1236817 | C | S | 1235444 | T | S | 1234994 | T | S | Yes | S, NULL | Null | — |
| 544 | 1239854 | A | I | 1238481 | G | V | 1238031 | G | V | Yes | NS, C | O53459 | GTP binding activity |
| 545 | 1241612 | C | P | 1240239 | T | S | 1239789 | T | S | Yes | NS, NC | O06567 | — |
| 546 | 1244718 | G | A | 1243345 | C | G | 1242895 | C | G | Yes | NS, C | O06572 | guanylate cyclase |
| | | | | | | | | | | | | | activity |
| 547 | 1245764 | G | V | 1244391 | C | V | 1243941 | C | V | Yes | S, NULL | Null | — |
| 548 | 1249753 | G | G | 1248380 | A | S | 1247930 | A | null | Yes | NS, NC | O06577 | — |
| 549 | 1250307 | C | P | 1248934 | G | P | 1248483 | G | P | Yes | S, NULL | Null | — |
| 550 | 1251711 | G | A | 1250338 | A | A | 1249887 | A | A | Yes | S, NULL | Null | — |
| 551 | 1251728 | G | P | 1250355 | T | T | 1249904 | T | T | Yes | NS, NC | O06579 | ATP binding activity |
| 552 | 1255933 | G | G | 1254560 | A | D | 1254109 | A | D | Yes | NS, NC | O06582 | — |
| 553 | 1255953 | C | L | 1254580 | T | F | 1254129 | T | F | Yes | NS, NC | O06582 | — |
| 554 | 1257383 | T | R | 1256010 | G | R | 1255559 | G | R | Yes | S, NULL | Null | — |
| 555 | 1259222 | T | M | 1257849 | C | T | 1257398 | C | T | Yes | NS, NC | O06583 | — |
| 556 | 1261908 | T | L | 1260535 | C | L | 1260084 | C | L | Yes | S, NULL | Null | — |
| 557 | 1282061 | C | G | 1280687 | T | D | 1280179 | T | D | Yes | NS, NC | O06551 | methyltransferase |
| | | | | | | | | | | | | | activity |
| 558 | 1282113 | T | T | 1280739 | C | A | 1280231 | C | A | Yes | NS, NC | O06551 | methyltransferase |
| | | | | | | | | | | | | | activity |
| 559 | 1283143 | C | P | 1281769 | T | S | 1281261 | T | S | Yes | NS, NC | O06553 | — |
| 560 | 1288484 | C | Null | 1287110 | T | Null | 1286600 | T | null | No | nc, NULL | Null | — |
| 561 | 1290071 | C | L | 1288697 | G | V | 1288187 | G | V | Yes | NS, C | O06559 | electron transport |
| 562 | 1291161 | G | G | 1289787 | A | D | 1289277 | A | D | Yes | NS, NC | O06559 | electron transport |
| 563 | 1295376 | T | V | 1294002 | C | A | 1293492 | C | A | Yes | NS, C | O06562 | electron transport |
| 564 | 1295770 | T | D | 1294396 | C | D | 1293886 | C | D | Yes | S, NULL | Null | — |
| 565 | 1303656 | G | H | 1302281 | T | Q | 1301771 | T | Q | Yes | NS, NC | O50428 | — |
| 566 | 1304272 | G | Null | 1302897 | A | Null | 1302387 | A | null | No | nc, NULL | Null | — |
| 567 | 1307530 | C | S | 1306279 | A | I | 1305769 | A | I | Yes | NS, NC | O50431 | electron transport |
| 568 | 1309207 | T | N | 1307956 | G | T | 1307446 | G | T | Yes | NS, C | O50431 | electron transport |
| 569 | 1311565 | T | V | 1310314 | C | A | 1309804 | C | A | Yes | NS, C | O50434 | transaminase activity |
| 570 | 1318177 | C | A | 1316925 | A | D | 1316414 | A | D | Yes | NS, NC | O50437 | alcohol dehydrogenase |
| | | | | | | | | | | | | | activity |
| 571 | 1325815 | A | R | 1324563 | G | R | 1324052 | G | R | Yes | S, NULL | Null | — |
| 572 | 1335064 | T | L | 1333812 | C | L | 1333301 | C | L | Yes | S, NULL | Null | — |
| 573 | 1340081 | C | Null | 1338829 | A | Null | 1338318 | A | null | Yes | nc, NULL | Null | — |
| 574 | 1341302 | T | L | 1340050 | G | R | 1339539 | G | R | Yes | NS, NC | O05298 | — |
| 575 | 1341343 | G | V | 1340091 | A | M | 1339580 | A | M | Yes | NS, NC | O05298 | — |
| 576 | 1341420 | T | A | 1340168 | C | A | 1339657 | C | A | Yes | S, NULL | Null | — |
| 577 | 1341887 | T | Null | 1340638 | C | Null | 1340127 | C | null | No | nc, NULL | Null | — |
| 578 | 1341914 | G | S | 1340665 | A | S | 1340154 | A | S | Yes | S, NULL | Null | — |
| 579 | 1342025 | C | I | 1340776 | T | I | 1340265 | T | I | Yes | S, NULL | Null | — |
| 580 | 1342028 | G | S | 1340779 | C | S | 1340268 | C | S | Yes | S, NULL | Null | — |
| 581 | 1342031 | C | G | 1340782 | T | G | 1340271 | T | G | Yes | S, NULL | Null | — |
| 582 | 1342077 | A | T | 1340828 | G | A | 1340317 | G | A | Yes | NS, NC | O05299 | — |
| 583 | 1342287 | A | D | 1341038 | C | A | 1340527 | C | A | Yes | NS, NC | O05300 | — |
| 584 | 1342456 | T | A | 1341207 | C | A | 1340696 | C | A | Yes | S, NULL | Null | — |
| 585 | 1343724 | A | A | 1342475 | G | A | 1341964 | G | A | Yes | S, NULL | Null | — |
| 586 | 1345988 | G | Y | 1344739 | A | Y | 1344228 | A | Y | Yes | S, NULL | Null | — |
| 587 | 1348420 | T | L | 1347171 | C | L | 1346660 | C | L | Yes | S, NULL | Null | — |
| 588 | 1352419 | G | Null | 1351170 | A | Null | 1350659 | A | null | No | nc, NULL | Null | — |
| 589 | 1356596 | T | I | 1355347 | C | V | 1354836 | C | V | Yes | NS, C | O05313 | biosynthesis |
| 590 | 1357184 | T | F | 1355935 | C | F | 1355424 | C | F | Yes | S, NULL | Null | — |
| 591 | 1360182 | A | S | 1358938 | C | A | 1358427 | C | A | Yes | NS, NC | O05316 | DNA binding activity |
| 592 | 1362617 | T | T | 1361373 | C | A | 1360862 | C | A | Yes | NS, NC | O05318 | — |
| 593 | 1367980 | C | L | 1366734 | T | F | 1366224 | T | F | Yes | NS, NC | O06291 | serine-type |
| | | | | | | | | | | | | | endopeptidase activity |
| 594 | 1368452 | A | N | 1367206 | G | S | 1366696 | G | S | Yes | NS, C | O06291 | serine-type |
| | | | | | | | | | | | | | endopeptidase activity |
| 595 | 1368728 | G | G | 1367482 | T | W | 1366972 | T | W | Yes | NS, NC | O33220 | protein targeting |
| 596 | 1370191 | G | A | 1368945 | A | V | 1368435 | A | V | Yes | NS, C | O33222 | — |
| 597 | 1372850 | C | Null | 1371604 | A | Null | 1371094 | A | null | Yes | nc, NULL | Null | — |
| 598 | 1375153 | G | P | 1373907 | A | S | 1373397 | A | S | Yes | NS, NC | O86313 | transcription factor |
| | | | | | | | | | | | | | activity |
| 599 | 1377868 | T | D | 1376622 | C | G | 1376112 | C | G | Yes | NS, NC | O86316 | — |
| 600 | 1377935 | C | D | 1376689 | T | N | 1376179 | T | N | Yes | NS, NC | O86316 | — |
| 601 | 1378384 | G | E | 1377138 | A | E | 1376628 | A | E | Yes | S, NULL | Null | — |
| 602 | 1383703 | C | R | 1382457 | T | H | 1381947 | T | H | Yes | NS, NC | O50455 | cobalt ion transport |
| 603 | 1388166 | T | G | 1386920 | C | G | 1386410 | C | G | Yes | S, NULL | Null | — |
| 604 | 1388824 | A | K | 1387578 | C | Q | 1387068 | C | Q | Yes | NS, NC | O50459 | — |
| 605 | 1391333 | T | A | 1390087 | C | A | 1389576 | C | A | Yes | S, NULL | Null | — |
| 606 | 1392007 | T | M | 1390761 | C | V | 1390250 | C | V | Yes | NS, NC | O50463 | metabolism |
| 607 | 1394247 | G | Null | 1393001 | T | Null | 1392490 | T | null | Yes | nc, NULL | Null | — |
| 608 | 1394944 | T | T | 1393698 | C | A | 1393187 | C | A | Yes | NS, NC | O50464 | — |
| 609 | 1396254 | G | G | 1395008 | A | R | 1394497 | A | R | Yes | NS, NC | O50465 | transporter activity |
| 610 | 1398445 | G | N | 1397199 | A | N | 1396688 | A | N | Yes | S, NULL | Null | — |
| 611 | 1401640 | G | V | 1400394 | A | M | 1399883 | A | M | Yes | NS, NC | Q11039 | nucleic acid binding |
| | | | | | | | | | | | | | activity |
| 612 | 1408298 | C | R | 1410060 | G | P | 1409548 | G | P | Yes | NS, NC | Q11066 | — |
| 613 | 1410739 | T | C | 1412501 | C | R | 1411989 | C | R | Yes | NS, NC | Q11055 | guanylate cyclase |
| | | | | | | | | | | | | | activity |
| 614 | 1412796 | T | R | 1414558 | C | R | 1414046 | C | R | Yes | S, NULL | Null | — |
| 615 | 1412800 | T | N | 1414562 | A | I | 1414050 | A | I | Yes | NS, NC | Q11053 | protein kinase activity |
| 616 | 1412889 | T | P | 1414651 | C | P | 1414139 | C | P | Yes | S, NULL | Null | — |
| 617 | 1413243 | G | A | 1415095 | C | A | 1414583 | C | A | Yes | S, NULL | Null | — |
| 618 | 1415700 | C | Null | 1417552 | G | Null | 1417040 | G | null | Yes | nc, NULL | Null | — |
| 619 | 1417495 | T | T | 1419347 | C | A | 1418835 | C | A | Yes | NS, NC | Q11049 | membrane |
| 620 | 1421972 | T | A | 1423824 | C | A | 1423312 | C | A | Yes | S, NULL | Null | — |
| 621 | 1422845 | C | P | 1424697 | T | L | 1424185 | T | L | Yes | NS, NC | Q11045 | membrane |
| 622 | 1423465 | A | Null | 1425317 | G | Null | 1424805 | G | null | No | nc, NULL | Null | — |
| 623 | 1423787 | A | S | 1425639 | T | T | 1425127 | T | T | Yes | NS, C | Q11043 | hydrolase activity |
| 624 | 1425622 | T | F | 1427474 | C | F | 1426962 | C | F | Yes | S, NULL | Null | — |
| 625 | 1435584 | A | R | 1437436 | C | R | 1436924 | C | R | Yes | S, NULL | Null | — |
| 626 | 1437785 | T | L | 1439637 | G | V | 1439125 | G | V | Yes | NS, C | Q10600 | sulfate assimilation |
| 627 | 1438084 | T | R | 1439936 | C | R | 1439424 | C | R | Yes | S, NULL | Null | — |
| 628 | 1440727 | G | Null | 1442732 | C | Null | 1442220 | C | null | No | nc, NULL | Null | — |
| 629 | 1452860 | T | N | 1454809 | C | N | 1454352 | C | N | Yes | S, NULL | Null | — |
| 630 | 1456125 | G | G | 1458074 | T | G | 1457617 | T | G | Yes | S, NULL | Null | — |
| 631 | 1456193 | A | Q | 1458142 | C | P | 1457685 | C | P | Yes | NS, NC | Q10618 | molecular_function |
| | | | | | | | | | | | | | unknown |
| 632 | 1457413 | G | G | 1459362 | T | V | 1458905 | T | V | Yes | NS, C | Q10606 | magnesium ion binding |
| | | | | | | | | | | | | | activity |
| 633 | 1458715 | T | V | 1460664 | C | V | 1460207 | C | V | Yes | S, NULL | Null | — |
| 634 | 1460269 | C | V | 1462218 | G | V | 1461761 | G | V | Yes | S, NULL | Null | — |
| 635 | 1465744 | T | V | 1467693 | C | A | 1467236 | C | A | Yes | NS, C | Q10620 | integral to membrane |
| 636 | 1465784 | A | G | 1467733 | G | G | 1467276 | G | G | Yes | S, NULL | Null | — |
| 637 | 1469253 | T | F | 1471215 | C | F | 1470758 | C | F | Yes | S, NULL | Null | — |
| 638 | 1476347 | T | L | 1478310 | C | L | 1477853 | C | L | Yes | S, NULL | Null | — |
| 639 | 1476918 | T | * | 1478881 | C | W | 1478424 | C | W | Yes | NS, TP | Q10630 | DNA binding activity |
| 640 | 1477120 | C | V | 1479083 | T | I | 1478626 | T | I | Yes | NS, C | Q10630 | DNA binding activity |
| 641 | 1487043 | C | A | 1489006 | T | T | 1490222 | T | T | Yes | NS, NC | Q10637 | — |
| 642 | 1488940 | G | P | 1490903 | A | S | 1492119 | A | S | Yes | NS, NC | Q10625 | |
| 643 | 1488946 | A | S | 1490909 | G | P | 1492125 | G | P | Yes | NS, NC | Q10625 | |
| 644 | 1490229 | C | G | 1492192 | T | D | 1493408 | T | D | Yes | NS, NC | Q10625 | |
| 645 | 1490640 | T | A | 1492603 | C | A | 1493819 | C | A | Yes | S, NULL | Null | — |
| 646 | 1494193 | G | G | 1496156 | A | D | 1497372 | A | D | Yes | NS, NC | Q10639 | enzyme activity |
| 647 | 1494324 | T | F | 1496287 | G | V | 1497503 | G | V | Yes | NS, NC | Q10639 | enzyme activity |
| 648 | 1494999 | T | S | 1496962 | G | A | 1498178 | G | A | Yes | NS, NC | Q10639 | enzyme activity |
| 649 | 1497326 | T | G | 1499289 | C | G | 1500505 | C | G | Yes | S, NULL | Null | — |
| 650 | 1497523 | T | K | 1499486 | C | E | 1500702 | C | E | Yes | NS, NC | Q10641 | — |
| 651 | 1499260 | G | R | 1501223 | T | R | 1502439 | T | R | Yes | S, NULL | Null | — |
| 652 | 1500014 | A | T | 1501977 | G | T | 1503193 | G | T | Yes | S, NULL | Null | — |
| 653 | 1503229 | C | G | 1505192 | T | G | 1506408 | T | G | Yes | S, NULL | Null | — |
| 654 | 1504008 | A | R | 1505971 | G | R | 1507187 | G | R | Yes | S, NULL | Null | — |
| 655 | 1505078 | A | S | 1507041 | G | G | 1508257 | G | G | Yes | NS, NC | Q10628 | tRNA binding activity |
| 656 | 1506717 | G | A | 1508680 | T | E | 1509896 | T | E | Yes | NS, NC | Q11013 | integral to membrane |
| 657 | 1521210 | C | A | 1523173 | A | A | 1524390 | A | A | Yes | S, NULL | Null | — |
| 658 | 1521826 | G | P | 1523789 | A | L | 1525006 | A | L | Yes | NS, NC | Q11025 | enzyme activity |
| 659 | 1524738 | T | V | 1526701 | G | G | 1527918 | G | G | Yes | NS, C | Q11028 | DNA binding activity |
| 660 | 1525971 | C | A | 1527934 | A | D | 1529151 | A | D | Yes | NS, NC | Q11028 | DNA binding activity |
| 661 | 1528766 | A | R | 1530729 | G | G | 1531946 | G | G | Yes | NS, NC | Q11029 | guanylate cyclase |
| | | | | | | | | | | | | | activity |
| 662 | 1530691 | T | A | 1532654 | G | A | 1533871 | G | A | Yes | S, NULL | Null | — |
| 663 | 1530694 | T | P | 1532657 | C | P | 1533874 | C | P | Yes | S, NULL | Null | — |
| 664 | 1530695 | G | P | 1532658 | T | P | 1533875 | T | P | Yes | S, NULL | Null | — |
| 665 | 1530763 | T | S | 1532726 | C | S | 1533943 | C | S | Yes | S, NULL | Null | — |
| 666 | 1530890 | T | N | 1532853 | C | S | 1534070 | C | S | Yes | NS, C | Q11031 | — |
| 667 | 1530894 | T | T | 1532857 | C | A | 1534074 | C | A | Yes | NS, NC | Q11031 | — |
| 668 | 1530957 | T | I | 1532920 | G | L | 1534137 | G | L | Yes | NS, C | Q11031 | — |
| 669 | 1531501 | C | G | 1533464 | T | G | 1534681 | T | G | Yes | S, NULL | Null | — |
| 670 | 1531505 | A | V | 1533468 | G | V | 1534685 | G | V | Yes | S, NULL | Null | — |
| 671 | 1531506 | C | V | 1533469 | T | V | 1534686 | T | V | Yes | S, NULL | Null | — |
| 672 | 1531581 | G | Q | 1533544 | T | K | 1534761 | T | K | Yes | NS, NC | Q11031 | — |
| 673 | 1531582 | A | A | 1533545 | C | A | 1534762 | C | A | Yes | S, NULL | Null | — |
| 674 | 1531585 | C | A | 1533548 | G | A | 1534765 | G | A | Yes | S, NULL | Null | — |
| 675 | 1532338 | C | G | 1534301 | A | V | 1535518 | A | V | Yes | NS, C | Q11032 | integral to membrane |
| 676 | 1532964 | T | N | 1534927 | G | T | 1536144 | G | T | Yes | NS, C | Q11033 | integral to membrane |
| 677 | 1534974 | T | T | 1536937 | C | A | 1538155 | C | A | Yes | NS, NC | Q11034 | two-component sensor |
| | | | | | | | | | | | | | molecule activity |
| 678 | 1535961 | T | K | 1537924 | C | E | 1539142 | C | E | Yes | NS, NC | Q11035 | — |
| 679 | 1537543 | A | Null | 1539506 | G | Null | 1540724 | G | null | No | nc, NULL | Null | — |
| 680 | 1538176 | C | V | 1540139 | T | I | 1541357 | T | I | Yes | NS, C | Q11037 | — |
| 681 | 1540933 | T | C | 1544253 | C | C | 1544113 | C | C | Yes | S, NULL | Null | — |
| 682 | 1543382 | T | A | 1546701 | C | A | 1546561 | C | A | Yes | S, NULL | Null | — |
| 683 | 1544766 | A | R | 1548085 | G | G | 1547945 | G | G | Yes | NS, NC | P71803 | — |
| 684 | 1544828 | A | P | 1548147 | G | P | 1548007 | G | P | Yes | S, NULL | Null | — |
| 685 | 1545475 | C | P | 1548794 | G | R | 1548654 | G | R | Yes | NS, NC | P71803 | — |
| 686 | 1546533 | C | P | 1549852 | G | R | 1549712 | G | R | Yes | NS, NC | P71804 | — |
| 687 | 1549309 | T | H | 1552628 | C | R | 1552488 | C | R | Yes | NS, NC | P71806 | — |
| 688 | 1551431 | T | F | 1554750 | G | V | 1554610 | G | V | Yes | NS, NC | P71809 | dihydroorotase activity |
| 689 | 1553002 | G | G | 1556321 | C | A | 1556181 | C | A | Yes | NS, C | P71811 | enzyme activity |
| 690 | 1556241 | A | E | 1559560 | C | A | 1559420 | C | A | Yes | NS, NC | Not | — |
| | | | | | | | | | | | | annotated | |
| 691 | 1556275 | T | H | 1559594 | C | H | 1559454 | C | H | Yes | S, NULL | Null | — |
| 692 | 1558090 | A | Null | 1561409 | G | Null | 1561269 | G | null | No | nc, NULL | Null | — |
| 693 | 1558582 | C | S | 1561901 | A | S | 1561761 | A | S | Yes | S, NULL | Null | — |
| 694 | 1558728 | C | A | 1562047 | T | V | 1561907 | T | V | Yes | NS, C | P71657 | — |
| 695 | 1563681 | G | A | 1567000 | A | T | 1566860 | A | T | Yes | NS, NC | P77899 | magnesium ion binding |
| | | | | | | | | | | | | | activity |
| 696 | 1569266 | T | H | 1572957 | C | R | 1572817 | C | null | Yes | NS, NC | P71664 | integral to membrane |
| 697 | 1570275 | T | Null | 1573966 | C | Null | 1573825 | C | null | No | nc, NULL | Null | — |
| 698 | 1570513 | C | G | 1574204 | T | D | 1574063 | T | D | Yes | NS, NC | P71665 | — |
| 699 | 1578358 | C | Null | 1582049 | T | Null | 1581905 | T | null | No | nc, NULL | Null | — |
| 700 | 1580686 | C | L | 1584377 | A | I | 1584233 | A | I | Yes | NS, C | P71675 | RNA binding activity |
| 701 | 1581590 | C | N | 1585281 | A | K | 1585137 | A | K | Yes | NS, NC | P71677 | enzyme activity |
| 702 | 1581711 | A | T | 1585402 | G | A | 1585258 | G | A | Yes | NS, NC | P71677 | enzyme activity |
| 703 | 1585618 | G | Null | 1589309 | T | Null | 1589165 | T | null | No | nc, NULL | Null | — |
| 704 | 1589763 | T | Null | 1593454 | C | Null | 1593310 | C | null | No | nc, NULL | Null | — |
| 705 | 1593041 | T | R | 1596732 | C | R | 1596588 | C | R | Yes | S, NULL | Null | — |
| 706 | 1593444 | T | V | 1597135 | C | A | 1596991 | C | A | Yes | NS, C | P71691 | — |
| 707 | 1596992 | T | L | 1600683 | C | P | 1600539 | C | P | Yes | NS, NC | P71694 | molecular_function |
| | | | | | | | | | | | | | unknown |
| 708 | 1604583 | C | T | 1608274 | A | N | 1608132 | A | N | Yes | NS, C | O06827 | — |
| 709 | 1605752 | C | Q | 1609443 | A | K | 1609301 | A | K | Yes | NS, NC | O06827 | — |
| 710 | 1607590 | C | Null | 1611281 | T | Null | 1611139 | T | null | No | nc, NULL | Null | — |
| 711 | 1609080 | T | T | 1612750 | C | A | 1612635 | C | A | Yes | NS, NC | O06823 | — |
| 712 | 1614744 | A | G | 1618414 | G | G | 1618299 | G | null | Yes | S, NULL | Null | — |
| 713 | 1614952 | T | N | 1618622 | G | T | 1618507 | G | null | Yes | NS, C | O06818 | structural molecule |
| | | | | | | | | | | | | | activity |
| 714 | 1615306 | C | G | 1618976 | T | D | 1618860 | T | null | Yes | NS, NC | O06818 | structural molecule |
| | | | | | | | | | | | | | activity |
| 715 | 1627846 | G | G | 1631524 | A | G | 1631407 | A | G | Yes | S, NULL | Null | — |
| 716 | 1628460 | G | H | 1632138 | T | N | 1632021 | T | N | Yes | NS, NC | O06810 | — |
| 717 | 1629691 | G | N | 1633342 | A | N | 1633252 | A | N | Yes | S, NULL | Null | — |
| 718 | 1631814 | A | T | 1635228 | G | A | 1635345 | G | A | Yes | NS, NC | O06809 | heme biosynthesis |
| 719 | 1636164 | G | L | 1639416 | A | L | 1639521 | A | L | Yes | S, NULL | Null | — |
| 720 | 1636389 | C | R | 1639641 | T | R | 1639746 | T | R | Yes | S, NULL | Null | — |
| 721 | 1637188 | T | G | 1640440 | C | G | 1640545 | C | G | Yes | S, NULL | Null | — |
| 722 | 1643728 | T | V | 1646980 | C | A | 1647138 | C | A | Yes | NS, C | O53151 | transcription factor |
| | | | | | | | | | | | | | activity |
| 723 | 1643863 | C | G | 1647115 | T | G | 1647273 | T | G | Yes | S, NULL | Null | — |
| 724 | 1656740 | T | S | 1659992 | C | P | 1660150 | C | P | Yes | NS, NC | O53163 | enzyme activity |
| 725 | 1657398 | T | Null | 1660650 | G | Null | 1660808 | G | null | No | nc, NULL | Null | — |
| 726 | 1657399 | T | Null | 1660651 | A | Null | 1660809 | A | null | No | nc, NULL | Null | — |
| 727 | 1658616 | A | Q | 1661868 | G | Q | 1662026 | G | Q | Yes | S, NULL | Null | — |
| 728 | 1659304 | C | P | 1662556 | T | Null | 1662714 | T | S | Yes | nc, NULL | Null | — |
| 729 | 1659465 | C | A | 1662717 | G | A | 1662875 | G | A | Yes | S, NULL | Null | — |
| 730 | 1668404 | T | R | 1671656 | C | R | 1671814 | C | R | Yes | S, NULL | Null | — |
| 731 | 1669135 | C | Null | 1672387 | T | Null | 1672545 | T | null | No | nc, NULL | Null | — |
| 732 | 1678674 | T | V | 1681926 | C | V | 1682084 | C | V | Yes | S, NULL | Null | — |
| 733 | 1681725 | C | S | 1684977 | T | S | 1685135 | T | S | Yes | S, NULL | Null | — |
| 734 | 1683015 | T | Null | 1686267 | C | Null | 1686425 | C | null | No | nc, NULL | Null | — |
| 735 | 1685046 | C | F | 1688298 | T | F | 1688456 | T | F | Yes | S, NULL | Null | — |
| 736 | 1687091 | G | Null | 1690343 | A | Null | 1690501 | A | null | Yes | S, NULL | Null | — |
| 737 | 1690478 | T | C | 1693731 | C | C | 1693889 | C | C | Yes | S, NULL | Null | — |
| 738 | 1690944 | T | K | 1694197 | C | E | 1694355 | C | null | Yes | NS, NC | CAB02017 | — |
| 739 | 1691292 | C | E | 1694545 | A | * | 1694703 | A | null | Yes | NS, TP | CAB02018 | — |
| 740 | 1692419 | A | Y | 1695672 | G | Y | 1695830 | G | Y | Yes | S, NULL | Null | — |
| 741 | 1694454 | A | R | 1710439 | C | S | 1710596 | C | S | Yes | NS, NC | Q50590 | integral to membrane |
| 742 | 1694605 | C | L | 1710590 | A | M | 1710747 | A | M | Yes | NS, NC | Q50590 | integral to membrane |
| 743 | 1696535 | T | I | 1712520 | G | S | 1712677 | G | S | Yes | NS, NC | Q50586 | enzyme activity |
| 744 | 1698303 | T | * | 1714288 | G | S | 1714445 | G | S | Yes | NS, TP | Q50585 | membrane |
| 745 | 1698786 | T | N | 1714771 | C | S | 1714928 | C | S | Yes | NS, C | Q50585 | membrane |
| 746 | 1700485 | G | P | 1716470 | A | S | 1716627 | A | S | Yes | NS, NC | Q50585 | membrane |
| 747 | 1701016 | C | A | 1717001 | T | T | 1717158 | T | T | Yes | NS, NC | Q50585 | membrane |
| 748 | 1703404 | T | F | 1719389 | C | F | 1719546 | C | F | Yes | S, NULL | Null | — |
| 749 | 1708108 | G | L | 1724093 | A | F | 1724250 | A | null | Yes | NS, NC | O53901 | enzyme activity |
| 750 | 1710829 | T | T | 1726814 | G | P | 1726970 | G | null | Yes | NS, NC | O53901 | enzyme activity |
| 751 | 1712677 | T | Null | 1728662 | C | Null | 1728818 | C | null | Yes | nc, NULL | Null | — |
| 752 | 1715811 | A | A | 1731796 | G | A | 1731952 | G | A | Yes | S, NULL | Null | — |
| 753 | 1723307 | G | A | 1739292 | C | P | 1739447 | C | P | Yes | NS, NC | Q10765 | tRNA ligase activity |
| 754 | 1734934 | A | A | 1750919 | C | A | 1751074 | C | A | Yes | S, NULL | Null | — |
| 755 | 1737144 | G | A | 1753129 | A | V | 1753284 | A | V | Yes | NS, C | Q10778 | integral to membrane |
| 756 | 1737486 | C | Null | 1753471 | G | Null | 1753626 | G | null | Yes | nc, NULL | Null | — |
| 757 | 1738210 | A | G | 1754193 | G | G | 1754349 | G | G | Yes | S, NULL | Null | — |
| 758 | 1738587 | C | S | 1754570 | T | L | 1754726 | T | L | Yes | NS, NC | Q10776 | enzyme activity |
| 759 | 1744942 | C | T | 1760921 | T | T | 1761077 | T | T | Yes | S, NULL | Null | — |
| 760 | 1752792 | T | T | 1766618 | C | A | 1766774 | C | A | Yes | NS, NC | Q10769 | hydrolase activity |
| 761 | 1760533 | A | Null | 1775165 | G | Null | 1775321 | G | null | No | nc, NULL | Null | — |
| 762 | 1779600 | A | A | 1794232 | G | A | 1785141 | G | A | Yes | S, NULL | Null | — |
| 763 | 1782943 | G | D | 1797575 | A | N | 1788484 | A | N | Yes | NS, NC | O06594 | nicotinate-nucleotide |
| | | | | | | | | | | | | | pyrophosphorylase |
| | | | | | | | | | | | | | (carboxylating) activity |
| 764 | 1785887 | G | Q | 1800519 | A | Q | 1791428 | A | Q | Yes | S, NULL | Null | — |
| 765 | 1789614 | A | E | 1804246 | G | E | 1795155 | G | E | Yes | S, NULL | Null | — |
| 766 | 1789681 | C | H | 1804313 | T | Y | 1795222 | T | Y | Yes | NS, C | O53907 | inositol/ |
| | | | | | | | | | | | | | phosphatidylinositol |
| | | | | | | | | | | | | | phosphatase |
| | | | | | | | | | | | | | activity |
| 767 | 1790156 | T | L | 1804788 | C | P | 1795697 | C | P | Yes | NS, NC | O53907 | inositol/ |
| | | | | | | | | | | | | | phosphatidylinositol |
| | | | | | | | | | | | | | phosphatase |
| | | | | | | | | | | | | | activity |
| 768 | 1790580 | T | L | 1805212 | C | P | 1796121 | C | P | Yes | NS, NC | O53908 | histidine biosynthesis |
| 769 | 1798626 | C | V | 1813258 | T | V | 1804167 | T | V | Yes | S, NULL | Null | — |
| 770 | 1802214 | T | D | 1816846 | G | E | 1807755 | G | E | Yes | NS, C | O06134 | magnesium ion binding |
| | | | | | | | | | | | | | activity |
| 771 | 1808750 | C | T | 1823382 | G | T | 1814291 | G | T | Yes | S, NULL | Null | — |
| 772 | 1811420 | C | A | 1826052 | T | T | 1816961 | T | T | Yes | NS, NC | O06141 | — |
| 773 | 1813171 | T | V | 1827803 | C | V | 1818712 | C | V | Yes | S, NULL | Null | — |
| 774 | 1813366 | A | Null | 1827998 | G | Null | 1818907 | G | null | No | nc, NULL | Null | — |
| 775 | 1813755 | T | R | 1828387 | C | R | 1819296 | C | R | Yes | S, NULL | Null | — |
| 776 | 1815661 | A | F | 1830293 | G | F | 1821202 | G | F | Yes | S, NULL | Null | — |
| 777 | 1820225 | A | T | 1834857 | G | A | 1825766 | G | A | Yes | NS, NC | O06147 | RNA binding activity |
| 778 | 1822223 | T | Null | 1836855 | G | Null | 1827764 | G | null | No | nc, NULL | Null | — |
| 779 | 1824626 | G | L | 1839258 | T | L | 1830167 | T | L | Yes | S, NULL | Null | — |
| 780 | 1825125 | C | R | 1839757 | G | G | 1830666 | G | G | Yes | NS, NC | O06151 | transporter activity |
| 781 | 1828921 | A | N | 1843553 | G | N | 1834462 | G | N | Yes | S, NULL | Null | — |
| 782 | 1834571 | C | G | 1849203 | T | D | 1840112 | T | D | Yes | NS, NC | P94974 | magnesium ion binding |
| | | | | | | | | | | | | | activity |
| 783 | 1834975 | C | R | 1849607 | T | R | 1840516 | T | R | Yes | S, NULL | Null | — |
| 784 | 1844924 | A | D | 1859557 | C | A | 1850466 | C | A | Yes | NS, NC | P94984 | magnesium ion binding |
| | | | | | | | | | | | | | activity |
| 785 | 1845757 | T | V | 1860390 | C | A | 1851299 | C | A | Yes | NS, C | P94985 | tRNA binding activity |
| 786 | 1850233 | A | V | 1864866 | G | A | 1855775 | G | A | Yes | NS, C | P94986 | — |
| 787 | 1858345 | G | R | 1872957 | A | R | 1863865 | A | R | Yes | S, NULL | Null | — |
| 788 | 1862697 | T | W | 1877309 | C | R | 1868217 | C | R | Yes | NS, NC | P94996 | enzyme activity |
| 789 | 1863620 | A | T | 1878232 | G | T | 1869140 | G | T | Yes | S, NULL | Null | — |
| 790 | 1864215 | C | P | 1878827 | T | S | 1869735 | T | S | Yes | NS, NC | P94996 | enzyme activity |
| 791 | 1867321 | T | Y | 1881933 | G | D | 1872841 | G | D | Yes | NS, NC | O65933 | enzyme activity |
| 792 | 1867566 | T | A | 1882178 | C | A | 1873086 | C | A | Yes | S, NULL | Null | — |
| 793 | 1869512 | T | V | 1884124 | C | A | 1875032 | C | A | Yes | NS, C | O65933 | enzyme activity |
| 794 | 1869897 | A | V | 1884509 | G | V | 1875417 | G | V | Yes | S, NULL | Null | — |
| 795 | 1870867 | G | G | 1885479 | C | R | 1876387 | C | R | Yes | NS, NC | O65933 | enzyme activity |
| 796 | 1871495 | G | C | 1886107 | A | Y | 1877015 | A | Y | Yes | NS, NC | O65933 | enzyme activity |
| 797 | 1873514 | A | T | 1888126 | G | A | 1879034 | G | A | Yes | NS, NC | O06586 | enzyme activity |
| 798 | 1874459 | C | P | 1889071 | G | A | 1879979 | G | A | Yes | NS, NC | O06586 | enzyme activity |
| 799 | 1878859 | A | T | 1893471 | G | T | 1884379 | G | T | Yes | S, NULL | Null | — |
| 800 | 1885417 | T | Null | 1900019 | C | Null | 1890823 | C | null | Yes | nc, NULL | Null | — |
| 801 | 1886196 | G | A | 1900798 | A | V | 1891602 | A | V | Yes | NS, C | O53922 | transcription factor |
| | | | | | | | | | | | | | activity |
| 802 | 1888569 | T | I | 1903171 | C | I | 1893975 | C | I | Yes | S, NULL | Null | — |
| 803 | 1890513 | G | G | 1905115 | C | A | 1895919 | C | A | Yes | NS, C | O33182 | — |
| 804 | 1891732 | G | Null | 1906334 | A | Null | 1897138 | A | null | No | nc, NULL | Null | — |
| 805 | 1897364 | A | F | 1912022 | C | V | 1902826 | C | V | Yes | NS, NC | O33188 | drug transporter activity |
| 806 | 1897922 | A | A | 1912580 | G | A | 1903384 | G | A | Yes | S, NULL | Null | — |
| 807 | 1899910 | C | A | 1914568 | A | A | 1905372 | A | A | Yes | S, NULL | Null | — |
| 808 | 1905462 | T | P | 1920118 | G | P | 1910922 | G | P | Yes | S, NULL | Null | — |
| 809 | 1910301 | C | G | 1924957 | T | G | 1915761 | T | G | Yes | S, NULL | Null | — |
| 810 | 1911052 | G | L | 1925708 | C | F | 1916512 | C | F | Yes | NS, NC | O33199 | — |
| 811 | 1911527 | A | T | 1926183 | G | A | 1916987 | G | A | Yes | NS, NC | O33199 | — |
| 812 | 1915691 | T | A | 1930348 | C | A | 1921152 | C | A | Yes | S, NULL | Null | — |
| 813 | 1916811 | A | Null | 1931468 | G | Null | 1922272 | G | null | No | nc, NULL | Null | — |
| 814 | 1917059 | C | V | 1931716 | G | L | 1922520 | G | L | Yes | NS, C | O33204 | — |
| 815 | 1921036 | G | A | 1935693 | T | S | 1926497 | T | S | Yes | NS, NC | O33206 | sulfate porter activity |
| 816 | 1921535 | A | Q | 1936192 | G | R | 1926996 | G | R | Yes | NS, NC | O33206 | sulfate porter activity |
| 817 | 1921866 | A | T | 1936523 | G | A | 1927327 | G | null | Yes | NS, NC | O33207 | — |
| 818 | 1928563 | A | Null | 1943220 | G | Null | 1934024 | G | null | Yes | S, NULL | Null | — |
| 819 | 1933291 | A | M | 1947949 | G | V | 1938753 | G | V | Yes | NS, NC | P71980 | — |
| 820 | 1934421 | T | R | 1949079 | C | R | 1939883 | C | R | Yes | S, NULL | Null | — |
| 821 | 1937104 | A | Null | 1951762 | G | Null | 1942565 | G | null | No | nc, NULL | Null | — |
| 822 | 1937372 | C | P | 1952030 | G | A | 1942833 | G | A | Yes | NS, NC | P71984 | sugar porter activity |
| 823 | 1938167 | T | Y | 1952825 | C | H | 1943628 | C | H | Yes | NS, C | P71984 | sugar porter activity |
| 824 | 1941920 | A | T | 1956521 | C | T | 1947381 | C | T | Yes | S, NULL | Null | — |
| 825 | 1942743 | C | Null | 1957344 | T | Null | 1948204 | T | null | Yes | nc, NULL | Null | — |
| 826 | 1946179 | C | A | 1960780 | T | T | 1951640 | T | A | Yes | NS, NC | P71992 | — |
| 827 | 1948447 | C | R | 1963048 | T | R | 1953908 | T | R | Yes | S, NULL | Null | — |
| 828 | 1949354 | C | G | 1963955 | T | D | 1954815 | T | D | Yes | NS, NC | P71994 | electron transport |
| 829 | 1949427 | G | H | 1964028 | C | D | 1954888 | C | D | Yes | NS, NC | P71994 | electron transport |
| 830 | 1950831 | G | Null | 1965432 | A | Null | 1956292 | A | null | No | nc, NULL | Null | — |
| 831 | 1953513 | C | T | 1968114 | A | K | 1958974 | A | K | Yes | NS, NC | P71999 | — |
| 832 | 1953569 | T | Null | 1968170 | G | Null | 1959030 | G | null | No | nc, NULL | Null | — |
| 833 | 1954568 | A | D | 1969168 | T | V | 1960028 | T | V | Yes | NS, NC | P72001 | protein kinase activity |
| 834 | 1956427 | T | Q | 1971027 | C | R | 1961887 | C | R | Yes | NS, NC | O06787 | — |
| 835 | 1956859 | T | Null | 1971459 | G | Null | 1962319 | G | null | Yes | S, NULL | Null | — |
| 836 | 1957123 | C | R | 1971723 | G | R | 1962583 | G | R | Yes | S, NULL | Null | — |
| 837 | 1957247 | G | S | 1971847 | A | F | 1962707 | A | F | Yes | NS, NC | P72002 | isopentenyl- |
| | | | | | | | | | | | | | diphosphate delta- |
| | | | | | | | | | | | | | isomerase activity |
| 838 | 1958508 | A | T | 1973108 | G | A | 1963968 | G | A | Yes | NS, NC | P72003 | protein kinase activity |
| 839 | 1961358 | T | S | 1975958 | G | S | 1966818 | G | S | Yes | S, NULL | Null | — |
| 840 | 1965950 | C | T | 1980550 | T | M | 1971410 | T | M | Yes | NS, NC | O65936 | monooxygenase activity |
| 841 | 1981202 | G | G | 1990359 | A | G | 1988183 | A | null | Yes | S, NULL | Null | — |
| 842 | 1982624 | G | G | 1991781 | A | G | 1989605 | A | null | Yes | S, NULL | Null | — |
| 843 | 1985405 | T | T | 1994564 | C | T | 1992387 | C | T | Yes | S, NULL | Null | — |
| 844 | 1989704 | G | R | 1999262 | A | Null | 1996686 | A | null | Yes | nc, NULL | Null | — |
| 845 | 1991672 | C | H | 2001230 | A | N | 1998654 | A | null | Yes | NS, NC | O06801 | — |
| 846 | 1993549 | T | L | 2003089 | C | L | 2000511 | C | L | Yes | S, NULL | Null | — |
| 847 | 1997652 | A | F | 2007192 | G | F | 2004614 | G | F | Yes | S, NULL | Null | — |
| 848 | 2001072 | A | Null | 2010612 | G | Null | 2008034 | G | null | No | nc, NULL | Null | — |
| 849 | 2002085 | G | Q | 2011625 | C | H | 2009047 | C | H | Yes | NS, NC | O33180 | monooxygenase activity |
| 850 | 2002894 | C | R | 2012434 | G | T | 2009856 | G | T | Yes | NS, NC | O33181 | — |
| 851 | 2004047 | T | L | 2013587 | C | L | 2011009 | C | L | Yes | S, NULL | Null | — |
| 852 | 2007749 | C | R | 2017289 | T | R | 2014711 | T | R | Yes | S, NULL | Null | — |
| 853 | 2008319 | A | H | 2017859 | G | R | 2015281 | G | R | Yes | NS, NC | O53933 | — |
| 854 | 2009694 | G | P | 2019234 | T | P | 2016656 | T | P | Yes | S, NULL | Null | — |
| 855 | 2011784 | G | A | 2021324 | A | A | 2018746 | A | A | Yes | S, NULL | Null | — |
| 856 | 2012022 | A | M | 2021562 | G | V | 2018984 | G | V | Yes | NS, NC | O53935 | nucleotide binding |
| | | | | | | | | | | | | | activity |
| 857 | 2017231 | A | Null | 2026774 | G | Null | 2024196 | G | null | Yes | nc, NULL | Null | — |
| 858 | 2018064 | G | A | 2027607 | T | S | 2025029 | T | S | Yes | NS, NC | O53939 | — |
| 859 | 2019447 | T | S | 2028990 | C | P | 2026412 | C | P | Yes | NS, NC | O53940 | — |
| 860 | 2019644 | G | P | 2029187 | A | P | 2026609 | A | P | Yes | S, NULL | Null | — |
| 861 | 2020481 | T | P | 2030024 | C | P | 2027446 | C | P | Yes | S, NULL | Null | — |
| 862 | 2020767 | T | Null | 2030310 | C | Null | 2027732 | C | null | No | nc, NULL | Null | — |
| 863 | 2020942 | T | G | 2030485 | C | G | 2027907 | C | null | Yes | S, NULL | Null | — |
| 864 | 2020943 | C | Q | 2030486 | A | Q | 2027908 | A | null | Yes | S, NULL | Null | — |
| 865 | 2020944 | A | Q | 2030487 | T | Q | 2027909 | T | null | Yes | S, NULL | Null | — |
| 866 | 2020976 | C | Q | 2030519 | T | * | 2027941 | T | null | Yes | NS, TP | Not | — |
| | | | | | | | | | | | | annotated | |
| 867 | 2021631 | T | P | 2031174 | G | P | 2028596 | G | P | Yes | S, NULL | Null | — |
| 868 | 2022570 | G | Null | 2032113 | A | Null | 2029535 | A | null | No | nc, NULL | Null | — |
| 869 | 2023460 | G | A | 2033003 | A | T | 2030425 | A | T | Yes | NS, NC | O53944 | — |
| 870 | 2023476 | A | D | 2033019 | G | G | 2030441 | G | G | Yes | NS, NC | O53944 | — |
| 871 | 2030339 | G | W | 2039882 | T | C | 2037304 | T | C | Yes | NS, NC | O53949 | — |
| 872 | 2030664 | G | V | 2040207 | T | F | 2037629 | T | F | Yes | NS, NC | O53949 | — |
| 873 | 2031415 | C | A | 2040958 | T | V | 2038380 | T | V | Yes | NS, C | O53949 | — |
| 874 | 2037036 | A | * | 2046579 | G | Q | 2044001 | G | Q | Yes | NS, TP | O53952 | — |
| 875 | 2037314 | C | Null | 2046857 | T | Null | 2044279 | T | null | Yes | nc, NULL | Null | — |
| 876 | 2039950 | T | P | 2049493 | C | P | 2046915 | C | P | Yes | S, NULL | Null | — |
| 877 | 2040516 | G | S | 2050059 | A | S | 2047481 | A | S | Yes | S, NULL | Null | — |
| 878 | 2041277 | C | A | 2050820 | G | G | 2048242 | G | G | Yes | NS, C | O53957 | — |
| 879 | 2042298 | T | * | 2051841 | C | Q | 2049263 | C | Q | Yes | NS, TP | O53958 | proton transport |
| 880 | 2043142 | C | S | 2052685 | G | * | 2050107 | G | * | Yes | NS, TP | O53958 | proton transport |
| 881 | 2044762 | A | T | 2054305 | G | T | 2051727 | G | T | Yes | S, NULL | Null | — |
| 882 | 2048737 | G | K | 2058280 | A | K | 2055702 | A | K | Yes | S, NULL | Null | — |
| 883 | 2052442 | T | S | 2061976 | C | G | 2059405 | C | G | Yes | NS, NC | Q50615 | integral to membrane |
| 884 | 2053144 | G | Null | 2062678 | A | Null | 2060017 | A | null | Yes | nc, NULL | Null | — |
| 885 | 2053386 | C | V | 2062920 | T | I | 2060259 | T | I | Yes | NS, C | Q50614 | nucleotide binding |
| | | | | | | | | | | | | | activity |
| 886 | 2054840 | G | A | 2064374 | A | V | 2061713 | A | V | Yes | NS, C | Q50614 | nucleotide binding |
| | | | | | | | | | | | | | activity |
| 887 | 2055511 | A | P | 2065045 | G | P | 2062384 | G | P | Yes | S, NULL | Null | — |
| 888 | 2062654 | C | A | 2072188 | A | E | 2069527 | A | E | Yes | NS, NC | Q50607 | glycine cleavage |
| | | | | | | | | | | | | | system complex |
| 889 | 2064683 | T | C | 2074217 | C | R | 2071556 | C | R | Yes | NS, NC | Q50604 | — |
| 890 | 2065441 | C | Y | 2075087 | T | Y | 2072314 | T | Y | Yes | S, NULL | Null | — |
| 891 | 2066872 | C | A | 2076518 | T | V | 2073745 | T | V | Yes | NS, C | Q50601 | glycine cleavage |
| | | | | | | | | | | | | | system |
| 892 | 2067570 | G | A | 2077216 | A | T | 2074443 | A | T | Yes | NS, NC | Q50601 | glycine cleavage |
| | | | | | | | | | | | | | system |
| 893 | 2068670 | T | V | 2078316 | C | V | 2075543 | C | V | Yes | S, NULL | Null | — |
| 894 | 2070996 | C | A | 2080642 | T | V | 2077869 | T | V | Yes | NS, C | Q50599 | enzyme activity |
| 895 | 2073217 | T | H | 2082863 | C | R | 2080091 | C | R | Yes | NS, NC | Q50597 | integral to membrane |
| 896 | 2074580 | A | C | 2084226 | G | R | 2081454 | G | R | Yes | NS, NC | Q50597 | integral to membrane |
| 897 | 2080993 | G | S | 2090774 | A | L | 2088002 | A | L | Yes | NS, NC | Q50592 | integral to membrane |
| 898 | 2082905 | A | G | 2092686 | G | G | 2089914 | G | G | Yes | S, NULL | Null | — |
| 899 | 2083932 | C | K | 2093713 | T | Null | 2090941 | T | null | Yes | nc, NULL | Null | — |
| 900 | 2086536 | A | Y | 2096324 | C | D | 2093546 | C | D | Yes | NS, NC | P95163 | — |
| 901 | 2087337 | T | N | 2097126 | C | N | 2094348 | C | N | Yes | S, NULL | Null | — |
| 902 | 2087353 | C | L | 2097142 | G | V | 2094364 | G | V | Yes | NS, C | P95162 | enzyme activity |
| 903 | 2090002 | T | L | 2099791 | A | M | 2097013 | A | M | Yes | NS, NC | P50050 | nickel ion binding |
| | | | | | | | | | | | | | activity |
| 904 | 2092402 | A | W | 2102191 | G | R | 2099413 | G | R | Yes | NS, NC | P95160 | electron transport |
| 905 | 2094478 | T | H | 2104268 | C | R | 2101490 | C | R | Yes | NS, NC | P95158 | metabolism |
| 906 | 2094633 | T | A | 2104423 | C | A | 2101645 | C | A | Yes | S, NULL | Null | — |
| 907 | 2097719 | T | M | 2107509 | C | T | 2104731 | C | T | Yes | NS, NC | P95155 | nucleotide binding |
| | | | | | | | | | | | | | activity |
| 908 | 2099098 | C | Null | 2108888 | A | Null | 2106110 | A | null | No | nc, NULL | Null | — |
| 909 | 2099682 | T | Null | 2109472 | C | Null | 2106694 | C | null | No | nc, NULL | Null | — |
| 910 | 2100574 | C | T | 2110363 | A | T | 2107586 | A | T | Yes | S, NULL | Null | — |
| 911 | 2103397 | C | Q | 2113186 | G | E | 2110409 | G | E | Yes | NS, NC | P95149 | DNA binding activity |
| 912 | 2110986 | T | L | 2120775 | C | Null | 2117998 | C | null | Yes | nc, NULL | Null | — |
| 913 | 2111005 | A | L | 2120794 | T | * | 2118017 | T | * | Yes | NS, TP | P95145 | base-excision repair |
| 914 | 2112834 | G | A | 2122623 | A | V | 2119846 | A | V | Yes | NS, C | P95143 | electron transport |
| 915 | 2113185 | G | A | 2122974 | C | G | 2120197 | C | G | Yes | NS, C | P95143 | electron transport |
| 916 | 2113487 | G | G | 2123276 | T | G | 2120499 | T | G | Yes | S, NULL | Null | — |
| 917 | 2113686 | A | N | 2123475 | G | D | 2120698 | G | D | Yes | NS, NC | O07756 | — |
| 918 | 2116072 | T | Null | 2125861 | C | Null | 2123084 | C | null | No | nc, NULL | Null | — |
| 919 | 2118582 | G | T | 2128370 | A | T | 2125593 | A | T | Yes | S, NULL | Null | — |
| 920 | 2119054 | A | T | 2128842 | G | A | 2126065 | G | A | Yes | NS, NC | O07752 | glutamate-ammonia |
| | | | | | | | | | | | | | ligase activity |
| 921 | 2119491 | A | A | 2129279 | C | A | 2126502 | C | A | Yes | S, NULL | Null | — |
| 922 | 2120739 | G | Null | 2130527 | A | Null | 2127750 | A | null | No | nc, NULL | Null | — |
| 923 | 2128138 | A | G | 2137901 | G | G | 2135149 | G | G | Yes | S, NULL | Null | — |
| 924 | 2134872 | A | D | 2144635 | G | D | 2141883 | G | D | Yes | S, NULL | Null | — |
| 925 | 2136113 | G | P | 2145876 | A | L | 2143124 | A | L | Yes | NS, NC | O07733 | — |
| 926 | 2137405 | T | Q | 2147123 | C | R | 2144416 | C | R | Yes | NS, NC | O07732 | guanylate cyclase |
| | | | | | | | | | | | | | activity |
| 927 | 2141458 | T | D | 2151176 | C | D | 2148469 | C | D | Yes | S, NULL | Null | — |
| 928 | 2141625 | T | M | 2151343 | C | T | 2148636 | C | T | Yes | NS, NC | O07728 | — |
| 929 | 2141958 | T | T | 2151676 | G | P | 2148969 | G | P | Yes | NS, NC | O07727 | monooxygenase activity |
| 930 | 2145004 | A | L | 2154722 | C | R | 2152015 | C | R | Yes | NS, NC | Q08129 | catalase activity |
| 931 | 2145783 | A | T | 2155501 | G | T | 2152794 | G | T | Yes | S, NULL | Null | — |
| 932 | 2146305 | T | P | 2156023 | G | P | 2153316 | G | P | Yes | S, NULL | Null | — |
| 933 | 2147148 | T | G | 2156866 | G | G | 2154159 | G | G | Yes | S, NULL | Null | — |
| 934 | 2147202 | T | T | 2156920 | A | T | 2154213 | A | T | Yes | S, NULL | Null | — |
| 935 | 2148389 | C | G | 2158107 | T | D | 2155400 | T | D | Yes | NS, NC | O07721 | NADPH: quinone |
| | | | | | | | | | | | | | reductase activity |
| 936 | 2153341 | A | L | 2163058 | G | L | 2160351 | G | L | Yes | S, NULL | Null | — |
| 937 | 2159560 | G | S | 2167924 | A | L | 2165280 | A | L | Yes | NS, NC | O53960 | — |
| 938 | 2159645 | G | R | 2168009 | T | S | 2165365 | T | S | Yes | NS, NC | O53960 | — |
| 939 | 2159953 | A | I | 2168317 | G | T | 2165673 | G | T | Yes | NS, NC | O53960 | — |
| 940 | 2163647 | C | I | 2172010 | G | M | 2169366 | G | M | Yes | NS, NC | O53962 | metabolism |
| 941 | 2166221 | A | R | 2174584 | C | R | 2171940 | C | R | Yes | S, NULL | Null | — |
| 942 | 2167025 | A | D | 2175388 | G | G | 2172744 | G | G | Yes | NS, NC | P95290 | — |
| 943 | 2167348 | A | N | 2175711 | G | D | 2173067 | G | D | Yes | NS, NC | P95290 | — |
| 944 | 2168708 | C | Null | 2177071 | T | Null | 2174427 | T | null | No | nc, NULL | Null | — |
| 945 | 2180277 | T | C | 2188640 | C | C | 2185973 | C | C | Yes | S, NULL | Null | — |
| 946 | 2188349 | C | L | 2196713 | G | V | 2194046 | G | V | Yes | NS, C | P95269 | — |
| 947 | 2188810 | A | T | 2197174 | G | T | 2194507 | G | T | Yes | S, NULL | Null | — |
| 948 | 2189303 | T | T | 2197667 | C | A | 2195000 | C | A | Yes | NS, NC | P95268 | — |
| 949 | 2190686 | G | R | 2199050 | C | G | 2196383 | C | G | Yes | NS, NC | P95266 | — |
| 950 | 2191050 | G | L | 2199414 | A | F | 2196747 | A | F | Yes | NS, NC | P95265 | — |
| 951 | 2192930 | C | R | 2201294 | T | H | 2198627 | T | null | Yes | NS, NC | P95260 | — |
| 952 | 2200251 | G | G | 2221333 | A | D | 2218667 | A | D | Yes | NS, NC | O53979 | S-adenosylmethionine- |
| | | | | | | | | | | | | | dependent |
| | | | | | | | | | | | | | methyltransferase |
| | | | | | | | | | | | | | activity |
| 953 | 2201224 | C | G | 2222306 | T | D | 2219640 | T | D | Yes | NS, NC | Q10875 | amino acid-polyamine |
| | | | | | | | | | | | | | transporter activity |
| 954 | 2204091 | C | R | 2225173 | A | L | 2222507 | A | L | Yes | NS, NC | Q10840 | ribonucleoside- |
| | | | | | | | | | | | | | diphosphate reductase |
| | | | | | | | | | | | | | activity |
| 955 | 2205817 | A | T | 2226899 | G | A | 2224233 | G | A | Yes | NS, NC | Q10873 | integral to membrane |
| 956 | 2208717 | G | P | 2229799 | C | P | 2227133 | C | P | Yes | S, NULL | Null | — |
| 957 | 2210402 | G | Null | 2231484 | A | Null | 2228818 | A | null | No | nc, NULL | Null | — |
| 958 | 2220658 | G | P | 2241740 | A | P | 2239074 | A | P | Yes | S, NULL | Null | — |
| 959 | 2221950 | G | R | 2243032 | T | S | 2240366 | T | S | Yes | NS, NC | Q10859 | enzyme activity |
| 960 | 2223259 | T | R | 2244341 | G | R | 2241675 | G | R | Yes | S, NULL | Null | — |
| 961 | 2225876 | C | V | 2246958 | G | V | 2244292 | G | V | Yes | S, NULL | Null | — |
| 962 | 2226085 | A | H | 2247167 | G | R | 2244501 | G | R | Yes | NS, NC | Q10856 | — |
| 963 | 2231155 | A | S | 2252237 | G | G | 2249571 | G | G | Yes | NS, NC | Q10850 | carbohydrate |
| | | | | | | | | | | | | | metabolism |
| 964 | 2232015 | C | A | 2253097 | A | A | 2250431 | A | A | Yes | S, NULL | Null | — |
| 965 | 2234651 | C | P | 2255733 | T | L | 2253067 | T | L | Yes | NS, NC | Q10850 | carbohydrate |
| | | | | | | | | | | | | | metabolism |
| 966 | 2237132 | G | D | 2258214 | A | N | 2255548 | A | N | Yes | NS, NC | Q10848 | — |
| 967 | 2239016 | T | Null | 2260098 | C | Null | 2257432 | C | null | No | nc, NULL | Null | — |
| 968 | 2240157 | G | E | 2261239 | A | E | 2258573 | A | E | Yes | S, NULL | Null | — |
| 969 | 2240609 | C | Null | 2261691 | G | Null | 2259025 | G | null | No | nc, NULL | Null | — |
| 970 | 2244542 | G | G | 2265624 | A | D | 2262958 | A | D | Yes | NS, NC | O53464 | — |
| 971 | 2246892 | T | R | 2267974 | G | R | 2265308 | G | R | Yes | S, NULL | Null | — |
| 972 | 2247313 | T | L | 2268395 | C | Null | 2265729 | C | L | Yes | nc, NULL | Null | — |
| 973 | 2253136 | C | V | 2269218 | A | F | 2271552 | A | F | Yes | NS, NC | O53470 | ATP binding activity |
| 974 | 2253292 | A | C | 2269374 | G | R | 2271708 | G | R | Yes | NS, NC | O53470 | ATP binding activity |
| 975 | 2255734 | G | Null | 2271818 | A | Null | 2274152 | A | null | No | nc, NULL | Null | — |
| 976 | 2258377 | C | V | 2274461 | A | L | 2276795 | A | L | Yes | NS, C | O53473 | ATP binding activity |
| 977 | 2263994 | T | L | 2280079 | C | P | 2282413 | C | P | Yes | NS, NC | O53476 | — |
| 978 | 2266289 | T | V | 2282374 | C | V | 2284708 | C | V | Yes | S, NULL | Null | — |
| 979 | 2266290 | T | V | 2282375 | C | V | 2284709 | C | V | Yes | S, NULL | Null | — |
| 980 | 2271395 | A | V | 2287480 | G | A | 2289814 | G | A | Yes | NS, C | O53485 | transporter activity |
| 981 | 2272986 | C | D | 2289071 | G | H | 2291405 | G | H | Yes | NS, NC | Q50575 | enzyme activity |
| 982 | 2275230 | C | P | 2291315 | T | S | 2293649 | T | S | Yes | NS, NC | O53489 | — |
| 983 | 2282106 | T | S | 2298191 | C | G | 2300525 | C | G | Yes | NS, NC | O53489 | enzyme activity |
| 984 | 2285002 | C | L | 2301087 | T | L | 2303421 | T | L | Yes | S, NULL | Null | — |
| 985 | 2304443 | G | A | 2320528 | A | V | 2322862 | A | V | Yes | NS, C | O53498 | biosynthesis |
| 986 | 2312457 | C | M | 2328541 | T | I | 2330875 | T | I | Yes | NS, NC | Q10672 | porphyrin biosynthesis |
| 987 | 2312508 | A | G | 2328592 | G | G | 2330926 | G | G | Yes | S, NULL | Null | — |
| 988 | 2312541 | T | A | 2328625 | C | A | 2330959 | C | A | Yes | S, NULL | Null | — |
| 989 | 2313380 | T | P | 2329464 | C | P | 2331798 | C | P | Yes | S, NULL | Null | — |
| 990 | 2317013 | T | H | 2335125 | C | H | 2337459 | C | H | Yes | S, NULL | Null | — |
| 991 | 2317887 | T | L | 2335999 | C | P | 2338333 | C | P | Yes | NS, NC | Q10687 | — |
| 992 | 2319259 | C | A | 2337371 | T | V | 2339705 | T | V | Yes | NS, C | Q10688 | membrane |
| 993 | 2322578 | T | L | 2340687 | C | L | 2343015 | C | L | Yes | S, NULL | Null | — |
| 994 | 2322919 | A | T | 2341028 | G | A | 2343356 | G | A | Yes | NS, NC | Q10691 | integral to membrane |
| 995 | 2329583 | T | I | 2347738 | C | T | 2350008 | C | T | Yes | NS, NC | Q10699 | DNA binding activity |
| 996 | 2332029 | G | R | 2350184 | A | R | 2352454 | A | R | Yes | S, NULL | Null | — |
| 997 | 2333365 | A | M | 2351520 | G | T | 2353790 | G | T | Yes | NS, NC | Q10701 | nucleic acid binding |
| | | | | | | | | | | | | | activity |
| 998 | 2335359 | A | V | 2353514 | G | A | 2355783 | G | A | Yes | NS, C | Q10704 | — |
| 999 | 2344034 | T | S | 2362191 | G | A | 2364459 | G | A | Yes | NS, NC | O53499 | nucleic acid binding |
| | | | | | | | | | | | | | activity |
| 1000 | 2349668 | C | G | 2369184 | G | R | 2370093 | G | R | Yes | NS, NC | O33244 | endopeptidase activity |
| 1001 | 2353673 | C | P | 2373246 | A | T | 2374098 | A | T | Yes | NS, NC | O33248 | — |
| 1002 | 2353887 | T | L | 2373460 | C | S | 2374312 | C | S | Yes | NS, NC | O33248 | — |
| 1003 | 2354188 | T | Y | 2373761 | C | Y | 2374613 | C | Y | Yes | S, NULL | Null | — |
| 1004 | 2356850 | G | Null | 2376423 | A | Null | 2377275 | A | null | No | nc, NULL | Null | — |
| 1005 | 2360168 | G | Null | 2379741 | C | Null | 2380593 | C | null | Yes | nc, NULL | Null | — |
| 1006 | 2364212 | C | V | 2383812 | T | I | 2382390 | T | I | Yes | NS, C | O33259 | dihydropteroate |
| | | | | | | | | | | | | | synthase activity |
| 1007 | 2365161 | C | R | 2384761 | A | R | 2383339 | A | R | Yes | S, NULL | Null | — |
| 1008 | 2369039 | A | D | 2388639 | G | G | 2387216 | G | null | Yes | NS, NC | O33261 | amino acid-polyamine |
| | | | | | | | | | | | | | transporter activity |
| 1009 | 2369143 | A | S | 2388743 | G | G | 2387320 | G | G | Yes | NS, NC | O33261 | amino acid-polyamine |
| | | | | | | | | | | | | | transporter activity |
| 1010 | 2370697 | G | Null | 2390297 | A | Null | 2388874 | A | null | No | nc, NULL | Null | — |
| 1011 | 2373913 | C | R | 2393513 | T | R | 2392090 | T | R | Yes | S, NULL | Null | — |
| 1012 | 2377026 | C | V | 2396626 | A | L | 2395203 | A | L | Yes | NS, C | O06239 | undecaprenol kinase |
| | | | | | | | | | | | | | activity |
| 1013 | 2384213 | C | L | 2403697 | G | L | 2402390 | G | L | Yes | S, NULL | Null | — |
| 1014 | 2393645 | G | P | 2413129 | A | L | 2411822 | A | L | Yes | NS, NC | O06224 | cytokinesis |
| 1015 | 2393760 | A | L | 2413244 | C | V | 2411937 | C | V | Yes | NS, C | O06224 | cytokinesis |
| 1016 | 2395865 | A | V | 2415349 | C | V | 2414042 | C | V | Yes | S, NULL | Null | — |
| 1017 | 2399656 | G | V | 2419140 | A | V | 2417833 | A | V | Yes | S, NULL | Null | — |
| 1018 | 2402330 | G | A | 2421814 | A | V | 2420507 | A | V | Yes | NS, C | O06217 | — |
| 1019 | 2405256 | G | Null | 2424862 | A | Null | 2423555 | A | null | No | nc, NULL | Null | — |
| 1020 | 2405346 | C | Null | 2424952 | A | Null | 2423645 | A | null | No | nc, NULL | Null | — |
| 1021 | 2405863 | C | R | 2425469 | T | R | 2424162 | T | R | Yes | S, NULL | Null | — |
| 1022 | 2408026 | G | A | 2427632 | A | V | 2426325 | A | V | Yes | NS, C | O06213 | — |
| 1023 | 2413856 | G | Null | 2434820 | A | Null | 2432155 | A | null | No | nc, NULL | Null | — |
| 1024 | 2416293 | T | S | 2437257 | G | A | 2434592 | G | A | Yes | NS, NC | O53508 | — |
| 1025 | 2416871 | A | L | 2437835 | G | P | 2435170 | G | P | Yes | NS, NC | O53509 | — |
| 1026 | 2417128 | G | A | 2438092 | T | S | 2435427 | T | S | Yes | NS, NC | O53510 | protein kinase activity |
| 1027 | 2418638 | T | K | 2439602 | G | T | 2436937 | G | T | Yes | NS, NC | O53511 | DNA binding activity |
| 1028 | 2421783 | T | T | 2442747 | G | P | 2440082 | G | P | Yes | NS, NC | O53514 | — |
| 1029 | 2423986 | C | G | 2444950 | A | G | 2442285 | A | G | Yes | S, NULL | Null | — |
| 1030 | 2426460 | T | I | 2447424 | G | I | 2444759 | G | I | Yes | S, NULL | Null | — |
| 1031 | 2426573 | G | Null | 2447537 | A | Null | 2444872 | A | null | No | nc, NULL | Null | — |
| 1032 | 2427491 | T | S | 2448456 | C | S | 2445791 | C | S | Yes | S, NULL | Null | — |
| 1033 | 2428328 | A | E | 2449293 | G | G | 2446628 | G | G | Yes | NS, NC | O53521 | enzyme activity |
| 1034 | 2433965 | A | T | 2454930 | G | T | 2452265 | G | T | Yes | S, NULL | Null | — |
| 1035 | 2433967 | G | T | 2454932 | A | T | 2452267 | A | T | Yes | S, NULL | Null | — |
| 1036 | 2438267 | C | I | 2459232 | G | M | 2456567 | G | M | Yes | NS, NC | Q10387 | electron transport |
| 1037 | 2440692 | A | S | 2461543 | C | A | 2458821 | C | A | Yes | NS, NC | Q10389 | integral to membrane |
| 1038 | 2447668 | T | V | 2468519 | C | V | 2465797 | C | V | Yes | S, NULL | Null | — |
| 1039 | 2449344 | G | C | 2470195 | A | C | 2467473 | A | C | Yes | S, NULL | Null | — |
| 1040 | 2449738 | C | Null | 2470589 | A | Null | 2467867 | A | null | Yes | S, NULL | Null | — |
| 1041 | 2452103 | C | S | 2472954 | T | L | 2470232 | T | L | Yes | NS, NC | Q10397 | porphyrin biosynthesis |
| 1042 | 2454263 | A | F | 2475114 | G | F | 2472392 | G | F | Yes | S, NULL | Null | — |
| 1043 | 2455035 | G | A | 2475886 | T | E | 2473164 | T | E | Yes | NS, NC | Q10399 | enzyme activity |
| 1044 | 2458114 | G | L | 2478965 | C | F | 2476243 | C | F | Yes | NS, NC | Q10401 | aminopeptidase activity |
| 1045 | 2463948 | G | G | 2484799 | A | D | 2482077 | A | D | Yes | NS, NC | Q10404 | enzyme activity |
| 1046 | 2465601 | C | L | 2486452 | T | F | 2483730 | T | F | Yes | NS, NC | Q10405 | integral to membrane |
| 1047 | 2468463 | G | Null | 2489314 | A | Null | 2486590 | A | null | No | nc, NULL | Null | — |
| 1048 | 2474596 | C | Null | 2495447 | T | Null | 2492723 | T | null | No | nc, NULL | Null | — |
| 1049 | 2474647 | C | L | 2495498 | T | L | 2492774 | T | L | Yes | S, NULL | Null | — |
| 1050 | 2478070 | A | D | 2498921 | G | G | 2496197 | G | G | Yes | NS, NC | Q10510 | — |
| 1051 | 2480295 | C | A | 2501146 | T | A | 2498422 | T | A | Yes | S, NULL | Null | — |
| 1052 | 2480652 | C | L | 2501502 | T | F | 2498778 | T | F | Yes | NS, NC | Q10511 | — |
| 1053 | 2481905 | T | Q | 2502755 | C | R | 2500031 | C | null | Yes | NS, NC | Q10513 | kinesin complex |
| 1054 | 2488510 | A | I | 2509360 | G | T | 2506634 | G | T | Yes | NS, NC | Q10518 | vitamin B12 |
| | | | | | | | | | | | | | biosynthesis |
| 1055 | 2488792 | A | G | 2509642 | G | G | 2506916 | G | G | Yes | S, NULL | Null | — |
| 1056 | 2490860 | T | K | 2511710 | G | T | 2508984 | G | T | Yes | NS, NC | Q10522 | integral to membrane |
| 1057 | 2492611 | C | R | 2513461 | G | G | 2510735 | G | G | Yes | NS, NC | Q10504 | pyruvate |
| | | | | | | | | | | | | | dehydrogenase |
| | | | | | | | | | | | | | (lipoamide) activity |
| 1058 | 2494787 | T | V | 2515637 | G | V | 2512911 | G | V | Yes | S, NULL | Null | — |
| 1059 | 2497280 | T | T | 2518130 | C | T | 2515404 | C | T | Yes | S, NULL | Null | — |
| 1060 | 2501788 | A | E | 2522726 | C | D | 2519999 | C | D | Yes | NS, C | Q10526 | — |
| 1061 | 2504215 | G | A | 2525150 | T | D | 2522412 | T | D | Yes | NS, NC | Q10528 | DNA binding activity |
| 1062 | 2507835 | A | V | 2528771 | G | A | 2526031 | G | A | Yes | NS, C | O53528 | lysine permease activity |
| 1063 | 2508361 | A | Null | 2529297 | G | Null | 2526557 | G | null | Yes | nc, NULL | Null | — |
| 1064 | 2508860 | C | G | 2529796 | G | A | 2527056 | G | A | Yes | NS, C | O53530 | — |
| 1065 | 2509390 | C | R | 2530326 | A | R | 2527586 | A | R | Yes | S, NULL | Null | — |
| 1066 | 2516165 | C | P | 2537209 | G | P | 2534414 | G | P | Yes | S, NULL | Null | — |
| 1067 | 2518574 | A | V | 2539618 | G | V | 2536823 | G | V | Yes | S, NULL | Null | — |
| 1068 | 2520531 | G | Null | 2541575 | A | Null | 2538780 | A | null | No | nc, NULL | Null | — |
| 1069 | 2524106 | T | L | 2545150 | C | P | 2542355 | C | P | Yes | NS, NC | Q50693 | membrane |
| 1070 | 2525002 | G | L | 2546046 | C | L | 2543251 | C | L | Yes | S, NULL | Null | — |
| 1071 | 2525661 | C | M | 2546705 | T | I | 2543910 | T | M | Yes | NS, NC | Q50689 | — |
| 1072 | 2528547 | G | P | 2549591 | A | L | 2546796 | A | L | Yes | NS, NC | Q50687 | glycerol metabolism |
| 1073 | 2533496 | T | Null | 2555898 | G | Null | 2551745 | G | null | No | nc, NULL | Null | — |
| 1074 | 2536766 | A | * | 2559168 | G | Q | 2555015 | G | Q | Yes | NS, TP | Q50679 | protein disulfide |
| | | | | | | | | | | | | | oxidoreductase activity |
| 1075 | 2537259 | G | Null | 2559661 | C | Null | 2555508 | C | null | No | nc, NULL | Null | — |
| 1076 | 2540378 | C | A | 2562781 | T | V | 2558628 | T | V | Yes | NS, C | Q50675 | membrane |
| 1077 | 2541551 | C | A | 2563956 | A | E | 2559803 | A | E | Yes | NS, NC | Q59570 | thiosulfate |
| | | | | | | | | | | | | | sulfurtransferase |
| | | | | | | | | | | | | | activity |
| 1078 | 2544362 | G | Null | 2566766 | A | Null | 2562613 | A | null | No | nc, NULL | Null | — |
| 1079 | 2550055 | A | H | 2572458 | G | H | 2568305 | G | H | Yes | S, NULL | Null | — |
| 1080 | 2553846 | A | D | 2576249 | G | G | 2572096 | G | G | Yes | NS, NC | Q50660 | molecular_function |
| | | | | | | | | | | | | | unknown |
| 1081 | 2554841 | G | V | 2577244 | A | V | 2573091 | A | V | Yes | S, NULL | Null | — |
| 1082 | 2555589 | A | W | 2577992 | G | R | 2573839 | G | R | Yes | NS, NC | Q50658 | enzyme activity |
| 1083 | 2558141 | T | V | 2580544 | G | G | 2576391 | G | G | Yes | NS, C | Q50657 | — |
| 1084 | 2558704 | A | R | 2581107 | C | R | 2576954 | C | R | Yes | S, NULL | Null | — |
| 1085 | 2560796 | A | K | 2583199 | G | Null | 2579046 | G | E | Yes | nc, NULL | Null | — |
| 1086 | 2569172 | G | V | 2591575 | C | L | 2587422 | C | L | Yes | NS, C | P71894 | transporter activity |
| 1087 | 2573528 | T | T | 2595931 | C | A | 2591777 | C | A | Yes | NS, NC | P71889 | — |
| 1088 | 2579779 | C | A | 2602182 | G | A | 2598028 | G | A | Yes | S, NULL | Null | — |
| 1089 | 2582470 | C | L | 2604873 | A | L | 2600719 | A | null | Yes | S, NULL | Null | — |
| 1090 | 2582888 | T | D | 2605291 | G | E | 2601137 | G | E | Yes | NS, C | P71880 | malic enzyme activity |
| 1091 | 2583687 | C | L | 2606090 | A | I | 2601936 | A | I | Yes | NS, C | P71880 | malic enzyme activity |
| 1092 | 2586084 | C | Null | 2608486 | T | Null | 2604332 | T | null | Yes | nc, NULL | Null | — |
| 1093 | 2589179 | T | H | 2611581 | C | H | 2607427 | C | H | Yes | S, NULL | Null | — |
| 1094 | 2589896 | T | R | 2612298 | G | R | 2608144 | G | R | Yes | S, NULL | Null | — |
| 1095 | 2592420 | T | V | 2614821 | C | A | 2610667 | C | A | Yes | NS, C | P95235 | membrane |
| 1096 | 2594770 | A | Null | 2617171 | G | Null | 2613017 | G | null | Yes | S, NULL | Null | — |
| 1097 | 2596868 | C | Null | 2619269 | T | Null | 2615115 | T | null | No | nc, NULL | Null | — |
| 1098 | 2603521 | C | A | 2625922 | T | A | 2621768 | T | A | Yes | S, NULL | Null | — |
| 1099 | 2609911 | G | R | 2641838 | A | H | 2639170 | A | H | Yes | NS, NC | O05839 | transcription factor |
| | | | | | | | | | | | | | activity |
| 1100 | 2611180 | A | F | 2643107 | G | F | 2640439 | G | F | Yes | S, NULL | Null | — |
| 1101 | 2614613 | A | A | 2646540 | G | A | 2643872 | G | A | Yes | S, NULL | Null | — |
| 1102 | 2626747 | A | V | 2658674 | G | A | 2656006 | G | A | Yes | NS, C | O05819 | enzyme activity |
| 1103 | 2627613 | C | G | 2659540 | T | G | 2656872 | T | G | Yes | S, NULL | Null | — |
| 1104 | 2643121 | T | Q | 2675048 | C | R | 2672380 | C | R | Yes | NS, NC | P71717 | enzyme activity |
| 1105 | 2650664 | T | T | 2682591 | C | A | 2679923 | C | A | Yes | NS, NC | P71756 | magnesium ion binding |
| | | | | | | | | | | | | | activity |
| 1106 | 2652240 | G | T | 2684167 | A | I | 2681499 | A | I | Yes | NS, NC | P71754 | — |
| 1107 | 2656797 | C | A | 2688724 | T | A | 2686056 | T | A | Yes | S, NULL | Null | — |
| 1108 | 2657264 | A | Q | 2689191 | G | R | 2686523 | G | R | Yes | NS, NC | P71750 | gamma-glutamyl |
| | | | | | | | | | | | | | transferase activity |
| 1109 | 2659785 | C | P | 2691711 | T | S | 2689043 | T | S | Yes | NS, NC | P71749 | — |
| 1110 | 2660947 | A | N | 2692873 | G | S | 2690205 | G | S | Yes | NS, C | P71748 | oxygen transporter |
| | | | | | | | | | | | | | activity |
| 1111 | 2661446 | C | A | 2693375 | T | A | 2690707 | T | A | Yes | S, NULL | Null | — |
| 1112 | 2661841 | G | S | 2693770 | A | N | 2691102 | A | N | Yes | NS, C | P71748 | oxygen transporter |
| | | | | | | | | | | | | | activity |
| 1113 | 2663078 | T | H | 2695007 | C | R | 2692339 | C | R | Yes | NS, NC | P71746 | transporter activity |
| 1114 | 2668981 | G | L | 2700910 | C | V | 2698242 | C | V | Yes | NS, C | P71740 | — |
| 1115 | 2671087 | T | G | 2703016 | G | G | 2700348 | G | G | Yes | S, NULL | Null | — |
| 1116 | 2671898 | T | A | 2703827 | C | A | 2701157 | C | A | Yes | S, NULL | Null | — |
| 1117 | 2677979 | G | A | 2709793 | A | A | 2706644 | A | A | Yes | S, NULL | Null | — |
| 1118 | 2681098 | A | L | 2712911 | C | R | 2709762 | C | R | Yes | NS, NC | P71728 | DNA binding activity |
| 1119 | 2683310 | C | A | 2715123 | T | T | 2711974 | T | T | Yes | NS, NC | P71727 | — |
| 1120 | 2684991 | C | R | 2716804 | T | R | 2713655 | T | R | Yes | S, NULL | Null | — |
| 1121 | 2685491 | A | V | 2717304 | G | A | 2714155 | G | A | Yes | NS, C | P71724 | enzyme activity |
| 1122 | 2686456 | T | S | 2718269 | C | G | 2715120 | C | G | Yes | NS, NC | O86328 | nicotinate-nucleotide |
| | | | | | | | | | | | | | adenylyltransferase |
| | | | | | | | | | | | | | activity |
| 1123 | 2687242 | A | Null | 2719055 | G | Null | 2715906 | G | null | No | nc, NULL | Null | — |
| 1124 | 2689080 | A | Y | 2720893 | G | H | 2717744 | R | ? | Yes | NS, C | P71924 | DNA binding activity |
| 1125 | 2689137 | C | A | 2720950 | T | T | 2717801 | Y | ? | Yes | NS, NC | P71924 | DNA binding activity |
| 1126 | 2689139 | A | I | 2720952 | G | T | 2717803 | R | ? | Yes | NS, NC | P71924 | DNA binding activity |
| 1127 | 2691689 | C | L | 2723504 | T | L | 2720355 | T | L | Yes | S, NULL | Null | — |
| 1128 | 2692030 | G | L | 2723845 | A | F | 2720696 | A | F | Yes | NS, NC | P71922 | nucleotide binding |
| | | | | | | | | | | | | | activity |
| 1129 | 2693966 | T | V | 2725801 | C | Null | 2722652 | C | V | Yes | nc, NULL | Null | — |
| 1130 | 2702213 | T | V | 2734048 | C | A | 2730899 | C | A | Yes | NS, C | P71913 | ribokinase activity |
| 1131 | 2705180 | A | Null | 2737015 | G | Null | 2733866 | G | null | Yes | nc, NULL | Null | — |
| 1132 | 2708856 | C | Null | 2740691 | T | Null | 2737539 | T | null | Yes | nc, NULL | Null | — |
| 1133 | 2709921 | T | L | 2741756 | G | L | 2738604 | G | L | Yes | S, NULL | Null | — |
| 1134 | 2719463 | A | T | 2751298 | G | T | 2748146 | G | T | Yes | S, NULL | Null | — |
| 1135 | 2720611 | G | D | 2752446 | A | N | 2749294 | A | N | Yes | NS, NC | O53178 | — |
| 1136 | 2721171 | T | Null | 2753006 | C | Null | 2749854 | C | null | No | nc, NULL | Null | — |
| 1137 | 2728310 | T | R | 2760145 | C | R | 2756992 | C | R | Yes | S, NULL | Null | — |
| 1138 | 2729181 | A | I | 2761016 | G | M | 2757863 | G | M | Yes | NS, NC | O53186 | transporter activity |
| 1139 | 2733102 | A | L | 2764937 | G | P | 2761784 | G | P | Yes | NS, NC | O53189 | cytokinesis |
| 1140 | 2736005 | C | Q | 2767840 | T | Q | 2764687 | T | Q | Yes | S, NULL | Null | — |
| 1141 | 2740904 | A | S | 2772739 | C | A | 2769586 | C | A | Yes | NS, NC | O53196 | nucleic acid binding |
| | | | | | | | | | | | | | activity |
| 1142 | 2741117 | C | G | 2772952 | T | S | 2769799 | T | S | Yes | NS, NC | O53196 | nucleic acid binding |
| | | | | | | | | | | | | | activity |
| 1143 | 2742343 | C | S | 2774178 | G | W | 2771025 | G | W | Yes | NS, NC | O53198 | alpha-amylase activity |
| 1144 | 2743386 | T | Null | 2775221 | C | Null | 2772068 | C | null | No | nc, NULL | Null | — |
| 1145 | 2745044 | A | V | 2776879 | G | A | 2773726 | G | A | Yes | NS, C | O53201 | — |
| 1146 | 2751087 | C | T | 2782925 | T | T | 2779772 | T | T | Yes | S, NULL | Null | — |
| 1147 | 2754350 | C | S | 2787546 | T | N | 2783035 | T | N | Yes | NS, C | O53207 | glycerol-3-phosphate O- |
| | | | | | | | | | | | | | acyltransferase activity |
| 1148 | 2757260 | C | G | 2790456 | A | C | 2785945 | A | C | Yes | NS, NC | O53208 | metabolism |
| 1149 | 2757900 | T | D | 2791096 | C | G | 2786585 | C | G | Yes | NS, NC | O53209 | molecular_function |
| | | | | | | | | | | | | | unknown |
| 1150 | 2758277 | G | A | 2791473 | A | A | 2786962 | A | A | Yes | S, NULL | Null | — |
| 1151 | 2762360 | T | T | 2795557 | C | T | 2791046 | C | T | Yes | S, NULL | Null | — |
| 1152 | 2763122 | A | V | 2796320 | G | A | 2791809 | G | A | Yes | NS, C | O53212 | — |
| 1153 | 2763158 | G | T | 2796356 | C | S | 2791845 | C | S | Yes | NS, C | O53212 | — |
| 1154 | 2771624 | A | H | 2804833 | G | H | 2800322 | G | H | Yes | S, NULL | Null | — |
| 1155 | 2774283 | A | D | 2807484 | C | A | 2802973 | C | A | Yes | NS, NC | O53217 | thymidylate synthase |
| | | | | | | | | | | | | | activity |
| 1156 | 2776115 | A | W | 2809316 | G | R | 2804805 | G | R | Yes | NS, NC | O06159 | protein binding activity |
| 1157 | 2777179 | T | S | 2810380 | C | G | 2805869 | C | G | Yes | NS, NC | O06160 | — |
| 1158 | 2779539 | G | G | 2812740 | A | G | 2808229 | A | G | Yes | S, NULL | Null | — |
| 1159 | 2784243 | T | L | 2817444 | G | F | 2812933 | G | F | Yes | NS, NC | O06165 | biotin carboxylase |
| | | | | | | | | | | | | | activity |
| 1160 | 2785043 | T | S | 2818244 | C | G | 2813733 | C | G | Yes | NS, NC | O06165 | biotin carboxylase |
| | | | | | | | | | | | | | activity |
| 1161 | 2789771 | T | P | 2822972 | C | P | 2818461 | C | P | Yes | S, NULL | Null | — |
| 1162 | 2792263 | A | K | 2825464 | G | K | 2820953 | G | K | Yes | S, NULL | Null | — |
| 1163 | 2798279 | G | G | 2831480 | A | G | 2826969 | A | G | Yes | S, NULL | Null | — |
| 1164 | 2802192 | T | Null | 2835393 | C | Null | 2830882 | C | null | No | nc, NULL | Null | — |
| 1165 | 2803099 | C | A | 2836300 | G | A | 2831789 | G | A | Yes | S, NULL | Null | — |
| 1166 | 2803100 | C | A | 2836301 | G | A | 2831790 | G | A | Yes | S, NULL | Null | — |
| 1167 | 2804844 | A | M | 2838045 | G | V | 2833534 | G | V | Yes | NS, NC | O53226 | — |
| 1168 | 2807819 | G | R | 2841020 | A | C | 2836509 | A | C | Yes | NS, NC | P95029 | enzyme activity |
| 1169 | 2814078 | G | D | 2847279 | A | D | 2842768 | A | D | Yes | S, NULL | Null | — |
| 1170 | 2818088 | A | V | 2851289 | G | V | 2846777 | G | V | Yes | S, NULL | Null | — |
| 1171 | 2818694 | G | Q | 2851895 | C | E | 2847383 | C | E | Yes | NS, NC | P95025 | — |
| 1172 | 2819952 | A | E | 2853153 | G | G | 2848641 | G | G | Yes | NS, NC | P95024 | nucleic acid binding |
| | | | | | | | | | | | | | activity |
| 1173 | 2824432 | A | D | 2857633 | G | D | 2853121 | G | D | Yes | S, NULL | Null | — |
| 1174 | 2825466 | T | D | 2858667 | G | A | 2854156 | G | A | Yes | NS, NC | P95020 | RNA binding activity |
| 1175 | 2837839 | T | Null | 2870384 | C | Null | 2866530 | C | null | No | nc, NULL | Null | — |
| 1176 | 2843260 | G | N | 2875806 | C | K | 2871952 | C | K | Yes | NS, NC | O07438 | nucleic acid binding |
| | | | | | | | | | | | | | activity |
| 1177 | 2846432 | T | D | 2878978 | C | G | 2875124 | C | G | Yes | NS, NC | Q50739 | nucleotide binding |
| | | | | | | | | | | | | | activity |
| 1178 | 2849417 | C | T | 2881964 | T | I | 2878109 | T | I | Yes | NS, NC | Q50737 | — |
| 1179 | 2853851 | A | S | 2886398 | G | G | 2882543 | G | G | Yes | NS, NC | Q50732 | — |
| 1180 | 2854021 | G | E | 2886568 | A | E | 2882713 | A | E | Yes | S, NULL | Null | — |
| 1181 | 2854631 | T | S | 2887178 | G | A | 2883323 | G | A | Yes | NS, NC | Q50732 | — |
| 1182 | 2858117 | T | L | 2890666 | C | L | 2886811 | C | L | Yes | S, NULL | Null | — |
| 1183 | 2863708 | A | V | 2896258 | G | A | 2892403 | G | A | Yes | NS, C | Q50649 | nucleic acid binding |
| | | | | | | | | | | | | | activity |
| 1184 | 2865290 | C | Null | 2897840 | G | Null | 2893985 | G | null | No | nc, NULL | Null | — |
| 1185 | 2865319 | G | Null | 2897869 | A | Null | 2894014 | A | null | No | nc, NULL | Null | — |
| 1186 | 2866213 | T | A | 2898763 | C | A | 2894908 | C | A | Yes | S, NULL | Null | — |
| 1187 | 2868616 | A | * | 2901166 | G | W | 2897311 | G | W | Yes | NS, TP | Q50644 | hydrolase activity |
| 1188 | 2871372 | A | T | 2903922 | G | A | 2900067 | G | A | Yes | NS, NC | Q50642 | enzyme activity |
| 1189 | 2871964 | A | Q | 2904514 | G | R | 2900659 | G | R | Yes | NS, NC | Q50642 | enzyme activity |
| 1190 | 2874457 | T | F | 2907007 | G | V | 2903152 | G | V | Yes | NS, NC | Q50639 | peptidyl-prolyl cis-trans |
| | | | | | | | | | | | | | isomerase activity |
| 1191 | 2879964 | A | T | 2912514 | G | T | 2908659 | G | T | Yes | S, NULL | Null | — |
| 1192 | 2880160 | G | P | 2912710 | T | T | 2908855 | T | T | Yes | NS, NC | Q50635 | protein targeting |
| 1193 | 2880535 | T | T | 2913085 | C | A | 2909230 | C | A | Yes | NS, NC | Q50635 | protein targeting |
| 1194 | 2881707 | C | S | 2914257 | T | N | 2910402 | T | N | Yes | NS, C | Q50634 | protein targeting |
| 1195 | 2886244 | A | Y | 2918794 | T | F | 2914939 | T | F | Yes | NS, C | Q50631 | enzyme activity |
| 1196 | 2887118 | A | L | 2919668 | G | L | 2915813 | G | L | Yes | S, NULL | Null | — |
| 1197 | 2888634 | A | T | 2921184 | G | A | 2917329 | G | A | Yes | NS, NC | Q50631 | enzyme activity |
| 1198 | 2890241 | A | S | 2922791 | G | G | 2918936 | G | G | Yes | NS, NC | Q50630 | — |
| 1199 | 2890386 | A | D | 2922936 | G | G | 2919081 | G | G | Yes | NS, NC | Q50630 | — |
| 1200 | 2890432 | C | G | 2922982 | T | G | 2919127 | T | G | Yes | S, NULL | Null | — |
| 1201 | 2893419 | C | R | 2925960 | T | C | 2922105 | T | C | Yes | NS, NC | Q50625 | — |
| 1202 | 2894748 | A | A | 2927289 | G | A | 2923434 | G | A | Yes | S, NULL | Null | — |
| 1203 | 2894968 | T | I | 2927509 | G | S | 2923654 | G | S | Yes | NS, NC | Q50622 | integral to membrane |
| 1204 | 2896114 | A | L | 2928655 | G | L | 2924800 | G | L | Yes | S, NULL | Null | — |
| 1205 | 2900347 | G | L | 2932888 | A | F | 2929033 | A | F | Yes | NS, NC | O06209 | acyl-CoA metabolism |
| 1206 | 2903343 | T | S | 2935884 | C | P | 2932029 | C | P | Yes | NS, NC | O06206 | — |
| 1207 | 2911002 | A | H | 2943543 | G | Null | 2939688 | G | null | Yes | nc, NULL | Null | — |
| 1208 | 2913009 | A | I | 2945541 | G | V | 2941686 | G | V | Yes | NS, C | O06198 | — |
| 1209 | 2913792 | C | Null | 2946324 | T | Null | 2942469 | T | null | No | nc, NULL | Null | — |
| 1210 | 2920364 | A | H | 2952899 | G | H | 2949044 | G | H | Yes | S, NULL | Null | — |
| 1211 | 2920770 | T | Null | 2953305 | G | Null | 2949450 | G | null | No | nc, NULL | Null | — |
| 1212 | 2922696 | T | L | 2955231 | C | S | 2951376 | C | S | Yes | NS, NC | O06184 | — |
| 1213 | 2922723 | G | R | 2955258 | C | P | 2951403 | C | P | Yes | NS, NC | O06184 | — |
| 1214 | 2926786 | G | Null | 2959321 | A | Null | 2955467 | A | null | No | nc, NULL | Null | — |
| 1215 | 2929067 | G | G | 2961602 | C | G | 2957748 | C | G | Yes | S, NULL | Null | — |
| 1216 | 2935735 | C | A | 2968270 | T | V | 2964416 | T | V | Yes | NS, C | P71942 | protein tyrosine |
| | | | | | | | | | | | | | phosphatase activity |
| 1217 | 2935930 | C | Null | 2968465 | G | Null | 2964611 | G | null | Yes | nc, NULL | Null | — |
| 1218 | 2938515 | A | R | 2982032 | G | R | 2976820 | G | R | Yes | S, NULL | Null | — |
| 1219 | 2941411 | C | A | 2984929 | G | G | 2979718 | G | G | Yes | NS, C | P71965 | — |
| 1220 | 2941695 | A | K | 2985213 | G | E | 2980002 | G | E | Yes | NS, NC | P71965 | — |
| 1221 | 2945109 | G | D | 2988627 | C | H | 2983416 | C | H | Yes | NS, NC | P71969 | — |
| 1222 | 2948228 | G | S | 2991691 | C | S | 2986535 | C | S | Yes | S, NULL | Null | — |
| 1223 | 2950721 | C | L | 2994184 | T | L | 2989028 | T | L | Yes | S, NULL | Null | — |
| 1224 | 2950791 | C | G | 2994254 | G | A | 2989098 | G | A | Yes | NS, C | O53231 | uroporphyrinogen |
| | | | | | | | | | | | | | decarboxylase activity |
| 1225 | 2953961 | T | V | 2997322 | C | A | 2992268 | C | A | Yes | NS, C | O07183 | nucleic acid binding |
| | | | | | | | | | | | | | activity |
| 1226 | 2956998 | C | S | 3000359 | T | L | 2995305 | T | L | Yes | NS, NC | O07185 | — |
| 1227 | 2959751 | G | G | 3003112 | C | A | 2998058 | C | A | Yes | NS, C | O07187 | transport |
| 1228 | 2959795 | T | C | 3003156 | G | G | 2998102 | G | G | Yes | NS, NC | O07187 | transport |
| 1229 | 2963534 | A | Y | 3006895 | G | Y | 3001840 | G | Y | Yes | S, NULL | Null | — |
| 1230 | 2963874 | G | R | 3007235 | A | * | 3002180 | A | * | Yes | NS, TP | O07192 | amino acid-polyamine |
| | | | | | | | | | | | | | transporter activity |
| 1231 | 2967056 | G | V | 3010417 | A | I | 3005362 | A | I | Yes | NS, C | O07194 | transport |
| 1232 | 2968202 | T | S | 3011563 | G | R | 3006508 | G | R | Yes | NS, NC | O07196 | nucleic acid binding |
| | | | | | | | | | | | | | activity |
| 1233 | 2969755 | T | N | 3013116 | C | D | 3008061 | C | D | Yes | NS, NC | O07198 | — |
| 1234 | 2978578 | G | S | 3021939 | C | T | 3016884 | C | T | Yes | NS, C | O07210 | — |
| 1235 | 2979168 | A | A | 3022529 | G | A | 3017474 | G | A | Yes | S, NULL | Null | — |
| 1236 | 2979744 | T | V | 3023105 | G | V | 3018050 | G | V | Yes | S, NULL | Null | — |
| 1237 | 2984242 | G | W | 3027603 | C | S | 3022542 | C | S | Yes | NS, NC | O07213 | — |
| 1238 | 2984434 | C | A | 3027795 | T | V | 3022734 | T | V | Yes | NS, C | O07213 | — |
| 1239 | 2984591 | A | L | 3027952 | G | L | 3022891 | G | L | Yes | S, NULL | Null | — |
| 1240 | 2987804 | G | H | 3031165 | A | Y | 3026104 | A | Y | Yes | NS, C | O07218 | cell wall catabolism |
| 1241 | 2988773 | C | A | 3032134 | T | V | 3027073 | T | V | Yes | NS, C | Q50765 | DNA binding activity |
| 1242 | 2993548 | G | T | 3036909 | A | I | 3031848 | A | I | Yes | NS, NC | O33229 | acyl-CoA |
| | | | | | | | | | | | | | dehydrogenase activity |
| 1243 | 2993831 | C | A | 3037192 | G | P | 3032131 | G | P | Yes | NS, NC | O33229 | acyl-CoA |
| | | | | | | | | | | | | | dehydrogenase activity |
| 1244 | 2998193 | C | Null | 3041554 | T | Null | 3036491 | T | null | No | nc, NULL | Null | — |
| 1245 | 2998315 | A | V | 3041676 | G | A | 3036613 | G | A | Yes | NS, C | O33234 | — |
| 1246 | 2998989 | C | L | 3042350 | G | F | 3037287 | G | F | Yes | NS, NC | O33234 | — |
| 1247 | 3001500 | T | V | 3044861 | C | V | 3039798 | C | V | Yes | S, NULL | Null | — |
| 1248 | 3011613 | A | G | 3055059 | C | G | 3049784 | C | G | Yes | S, NULL | Null | — |
| 1249 | 3011639 | A | D | 3055085 | G | G | 3049810 | G | G | Yes | NS, NC | O33284 | — |
| 1250 | 3012496 | G | L | 3055919 | A | L | 3050644 | A | L | Yes | S, NULL | Null | — |
| 1251 | 3014181 | G | Q | 3057604 | T | K | 3052329 | T | K | Yes | NS, NC | P31511 | — |
| 1252 | 3015844 | G | E | 3059267 | A | E | 3053992 | A | null | Yes | S, NULL | Null | — |
| 1253 | 3026379 | C | V | 3069802 | G | V | 3064527 | G | V | Yes | S, NULL | Null | — |
| 1254 | 3029501 | A | * | 3072924 | G | Q | 3067649 | G | Q | Yes | NS, TP | O33304 | — |
| 1255 | 3033865 | C | R | 3077288 | G | P | 3072013 | G | P | Yes | NS, NC | O33310 | — |
| 1256 | 3035400 | A | S | 3078823 | G | P | 3073548 | G | P | Yes | NS, NC | O33311 | — |
| 1257 | 3036408 | A | A | 3079831 | G | A | 3074556 | G | A | Yes | S, NULL | Null | — |
| 1258 | 3036451 | G | S | 3079874 | A | F | 3074599 | A | F | Yes | NS, NC | O33312 | — |
| 1259 | 3038305 | A | I | 3081728 | G | T | 3076453 | G | T | Yes | NS, NC | P72024 | dihydrodipicolinate |
| | | | | | | | | | | | | | reductase activity |
| 1260 | 3038502 | T | E | 3081925 | G | D | 3076650 | G | D | Yes | NS, C | P72024 | dihydrodipicolinate |
| | | | | | | | | | | | | | reductase activity |
| 1261 | 3043278 | T | I | 3086725 | C | M | 3081450 | C | M | Yes | NS, NC | O33321 | DNA binding activity |
| 1262 | 3045174 | G | V | 3088622 | A | V | 3083347 | A | V | Yes | S, NULL | Null | — |
| 1263 | 3049237 | G | Null | 3092685 | A | Null | 3087410 | A | null | No | nc, NULL | Null | — |
| 1264 | 3053917 | C | A | 3097365 | A | D | 3092089 | A | D | Yes | NS, NC | O33330 | transcription factor |
| | | | | | | | | | | | | | activity |
| 1265 | 3054660 | A | G | 3098108 | G | G | 3092832 | G | G | Yes | S, NULL | Null | — |
| 1266 | 3055488 | C | Null | 3098936 | G | Null | 3093660 | G | null | No | nc, NULL | Null | — |
| 1267 | 3058474 | C | A | 3101922 | T | T | 3096643 | T | T | Yes | NS, NC | O33334 | recombinase activity |
| 1268 | 3058662 | A | V | 3102110 | G | A | 3096831 | G | A | Yes | NS, C | O33334 | recombinase activity |
| 1269 | 3060738 | G | C | 3104186 | A | C | 3098907 | A | C | Yes | S, NULL | Null | — |
| 1270 | 3061693 | A | F | 3105141 | C | C | 3099862 | C | C | Yes | NS, NC | P71655 | — |
| 1271 | 3063629 | A | A | 3107077 | G | A | 3101798 | G | A | Yes | S, NULL | Null | — |
| 1272 | 3066230 | C | D | 3109675 | T | D | 3104396 | T | D | Yes | S, NULL | Null | — |
| 1273 | 3069429 | A | V | 3112874 | G | A | 3107595 | G | A | Yes | NS, C | P71647 | — |
| 1274 | 3069475 | T | T | 3112920 | C | A | 3107641 | C | A | Yes | NS, NC | P71647 | — |
| 1275 | 3072095 | C | P | 3115540 | A | T | 3110261 | A | T | Yes | NS, NC | P71642 | — |
| 1276 | 3074999 | G | V | 3118446 | A | I | 3113166 | A | I | Yes | NS, C | P71638 | — |
| 1277 | 3081797 | A | * | 3125232 | G | Q | 3119439 | G | Q | Yes | NS, TP | P71635 | — |
| 1278 | 3084028 | G | R | 3127463 | T | R | 3121670 | T | R | Yes | S, NULL | Null | — |
| 1279 | 3089119 | G | P | 3132545 | T | H | 3126761 | T | H | Yes | NS, NC | P71628 | — |
| 1280 | 3089527 | T | E | 3132953 | G | A | 3127169 | G | A | Yes | NS, NC | P71627 | — |
| 1281 | 3089534 | G | L | 3132960 | A | L | 3127176 | A | L | Yes | S, NULL | Null | — |
| 1282 | 3089536 | T | Q | 3132962 | G | Q | 3127178 | G | Q | Yes | S, NULL | Null | — |
| 1283 | 3089537 | G | Q | 3132963 | T | Q | 3127179 | T | Q | Yes | S, NULL | Null | — |
| 1284 | 3089546 | G | L | 3132972 | C | V | 3127188 | C | V | Yes | NS, C | P71627 | — |
| 1285 | 3089625 | G | C | 3133051 | C | C | 3127267 | C | C | Yes | S, NULL | Null | — |
| 1286 | 3089626 | C | C | 3133052 | G | C | 3127268 | G | C | Yes | S, NULL | Null | — |
| 1287 | 3091410 | A | R | 3134836 | G | R | 3129052 | G | R | Yes | S, NULL | Null | — |
| 1288 | 3092467 | G | G | 3135893 | A | G | 3130109 | A | G | Yes | S, NULL | Null | — |
| 1289 | 3092732 | G | A | 3136158 | T | E | 3130374 | T | E | Yes | NS, NC | P71624 | — |
| 1290 | 3093808 | C | Null | 3137234 | T | Null | 3131450 | T | null | No | nc, NULL | Null | — |
| 1291 | 3094520 | T | C | 3137946 | C | R | 3132162 | C | R | Yes | NS, NC | P71621 | enzyme activity |
| 1292 | 3096227 | G | P | 3139653 | C | A | 3133869 | C | A | Yes | NS, NC | P71619 | transporter activity |
| 1293 | 3096535 | A | L | 3139961 | G | P | 3134175 | G | L | Yes | NS, NC | P71619 | transporter activity |
| 1294 | 3096724 | A | I | 3140150 | C | S | 3134364 | C | I | Yes | NS, NC | P71619 | transporter activity |
| 1295 | 3098942 | T | L | 3142369 | C | L | 3136583 | C | L | Yes | S, NULL | Null | — |
| 1296 | 3099150 | A | L | 3142577 | G | P | 3136791 | G | P | Yes | NS, NC | P71616 | transporter activity |
| 1297 | 3103523 | C | E | 3146950 | T | E | 3141164 | T | E | Yes | S, NULL | Null | — |
| 1298 | 3108827 | T | T | 3152254 | C | A | 3146468 | C | A | Yes | NS, NC | O05814 | tRNA ligase activity |
| 1299 | 3108991 | C | R | 3152418 | T | H | 3146632 | T | H | Yes | NS, NC | O05814 | tRNA ligase activity |
| 1300 | 3111157 | C | R | 3154584 | T | R | 3148798 | T | R | Yes | S, NULL | Null | — |
| 1301 | 3111158 | C | R | 3154585 | G | R | 3148799 | G | R | Yes | S, NULL | Null | — |
| 1302 | 3114301 | G | C | 3157782 | C | W | 3151996 | C | W | Yes | NS, NC | O05810 | ATP binding activity |
| 1303 | 3115235 | T | S | 3158716 | C | G | 3152930 | C | G | Yes | NS, NC | O05809 | nucleotide binding |
| | | | | | | | | | | | | | activity |
| 1304 | 3115753 | T | Q | 3159234 | C | R | 3153448 | C | R | Yes | NS, NC | O05809 | nucleotide binding |
| | | | | | | | | | | | | | activity |
| 1305 | 3119320 | C | N | 3162801 | A | K | 3157013 | A | K | Yes | NS, NC | O05806 | — |
| 1306 | 3121306 | T | D | 3164787 | C | D | 3158999 | C | D | Yes | S, NULL | Null | — |
| 1307 | 3127009 | G | P | 3170490 | C | P | 3164702 | C | P | Yes | S, NULL | Null | — |
| 1308 | 3131012 | G | R | 3174493 | A | C | 3168651 | A | C | Yes | NS, NC | O33344 | — |
| 1309 | 3131107 | G | P | 3174588 | C | R | 3168746 | C | R | Yes | NS, NC | O33344 | — |
| 1310 | 3133059 | A | I | 3176540 | G | I | 3170698 | G | I | Yes | S, NULL | Null | — |
| 1311 | 3135930 | G | A | 3179411 | T | D | 3173569 | T | D | Yes | NS, NC | O33350 | isoprenoid biosynthesis |
| 1312 | 3137504 | A | F | 3180985 | C | V | 3175143 | C | V | Yes | NS, NC | O33351 | metalloendopeptidase |
| | | | | | | | | | | | | | activity |
| 1313 | 3141276 | T | Null | 3184757 | G | Null | 3178914 | G | null | Yes | nc, NULL | Null | — |
| 1314 | 3144308 | C | R | 3187789 | T | W | 3181946 | T | R | Yes | NS, NC | Q10802 | integral to membrane |
| 1315 | 3145285 | G | H | 3188766 | A | Y | 3182923 | A | Y | Yes | NS, C | Q10803 | membrane |
| 1316 | 3145758 | G | A | 3189239 | A | A | 3183396 | A | A | Yes | S, NULL | Null | — |
| 1317 | 3146096 | C | Null | 3189577 | T | Null | 3183734 | T | null | No | nc, NULL | Null | — |
| 1318 | 3146180 | C | K | 3189661 | T | K | 3183818 | T | K | Yes | S, NULL | Null | — |
| 1319 | 3149728 | T | Null | 3193210 | C | Null | 3187366 | C | null | No | nc, NULL | Null | — |
| 1320 | 3150908 | A | I | 3194389 | T | K | 3188545 | T | K | Yes | NS, NC | Q10809 | — |
| 1321 | 3152247 | C | V | 3195728 | T | V | 3189884 | T | V | Yes | S, NULL | Null | — |
| 1322 | 3154848 | A | M | 3198329 | G | T | 3192485 | G | T | Yes | NS, NC | Q10788 | translation elongation |
| | | | | | | | | | | | | | factor activity |
| 1323 | 3156820 | G | V | 3200301 | A | V | 3194457 | A | V | Yes | S, NULL | Null | — |
| 1324 | 3162781 | C | G | 3206262 | T | E | 3200418 | T | E | Yes | NS, NC | Q10817 | DNA mediated |
| | | | | | | | | | | | | | transformation |
| 1325 | 3163766 | T | L | 3207247 | A | L | 3201403 | A | L | Yes | S, NULL | Null | — |
| 1326 | 3169156 | T | H | 3212637 | C | R | 3206793 | C | R | Yes | NS, NC | Q10793 | RNA binding activity |
| 1327 | 3169605 | T | N | 3213086 | C | D | 3207242 | C | D | Yes | NS, NC | Q10789 | proteolysis and |
| | | | | | | | | | | | | | peptidolysis |
| 1328 | 3179819 | T | E | 3223300 | C | E | 3217456 | C | E | Yes | S, NULL | Null | — |
| 1329 | 3185717 | A | W | 3229198 | G | R | 3223352 | G | R | Yes | NS, NC | Q10961 | enzyme activity |
| 1330 | 3186529 | C | R | 3230010 | A | L | 3224164 | A | L | Yes | NS, NC | Q10961 | enzyme activity |
| 1331 | 3187380 | A | D | 3230861 | G | D | 3225015 | G | D | Yes | S, NULL | Null | — |
| 1332 | 3192343 | C | G | 3235712 | G | R | 3230035 | G | R | Yes | NS, NC | Q10970 | ATP-binding cassette |
| | | | | | | | | | | | | | (ABC) transporter |
| | | | | | | | | | | | | | activity |
| 1333 | 3193344 | C | R | 3236713 | A | L | 3231036 | A | L | Yes | NS, NC | Q10970 | ATP-binding cassette |
| | | | | | | | | | | | | | (ABC) transporter |
| | | | | | | | | | | | | | activity |
| 1334 | 3199928 | C | Null | 3243352 | T | Null | 3237675 | T | null | No | nc, NULL | Null | — |
| 1335 | 3200987 | G | V | 3244411 | A | M | 3238734 | A | M | Yes | NS, NC | Q10976 | enzyme activity |
| 1336 | 3203120 | C | T | 3246544 | A | N | 3240867 | A | N | Yes | NS, C | Q10977 | enzyme activity |
| 1337 | 3204152 | A | Q | 3247576 | G | R | 3241899 | G | R | Yes | NS, NC | Q10977 | enzyme activity |
| 1338 | 3211268 | T | A | 3254692 | C | A | 3249015 | C | A | Yes | S, NULL | Null | — |
| 1339 | 3211453 | T | L | 3254877 | G | R | 3249200 | G | R | Yes | NS, NC | Q10978 | enzyme activity |
| 1340 | 3217579 | A | G | 3261003 | C | G | 3255326 | C | G | Yes | S, NULL | Null | — |
| 1341 | 3219201 | A | I | 3262625 | G | M | 3256948 | G | M | Yes | NS, NC | P96203 | enzyme activity |
| 1342 | 3222603 | G | S | 3266027 | A | S | 3260350 | A | S | Yes | S, NULL | Null | — |
| 1343 | 3224288 | C | A | 3267712 | A | E | 3262035 | A | E | Yes | NS, NC | P96203 | enzyme activity |
| 1344 | 3227610 | G | D | 3271034 | A | N | 3265357 | A | N | Yes | NS, NC | P96204 | enzyme activity |
| 1345 | 3229711 | G | D | 3273135 | C | H | 3267458 | C | H | Yes | NS, NC | P96205 | nucleotide binding |
| | | | | | | | | | | | | | activity |
| 1346 | 3230432 | T | L | 3273856 | C | L | 3268179 | C | L | Yes | S, NULL | Null | — |
| 1347 | 3238652 | A | C | 3282076 | T | S | 3276399 | T | S | Yes | NS, NC | P96291 | enzyme activity |
| 1348 | 3239912 | T | I | 3283336 | G | S | 3277659 | G | S | Yes | NS, NC | P96290 | enzyme activity |
| 1349 | 3240065 | G | R | 3283489 | A | Q | 3277812 | A | Q | Yes | NS, NC | P96290 | enzyme activity |
| 1350 | 3240165 | C | G | 3283589 | G | G | 3277912 | G | G | Yes | S, NULL | Null | — |
| 1351 | 3242680 | A | V | 3286104 | C | V | 3280427 | C | V | Yes | S, NULL | Null | — |
| 1352 | 3243139 | T | A | 3286563 | C | A | 3280886 | C | A | Yes | S, NULL | Null | — |
| 1353 | 3248962 | A | V | 3292272 | G | A | 3286595 | G | A | Yes | NS, C | P96285 | alcohol dehydrogenase |
| | | | | | | | | | | | | | activity |
| 1354 | 3249193 | C | G | 3292503 | A | V | 3286826 | A | V | Yes | NS, C | P96285 | alcohol dehydrogenase |
| | | | | | | | | | | | | | activity |
| 1355 | 3250170 | A | A | 3293480 | G | A | 3287803 | G | A | Yes | S, NULL | Null | — |
| 1356 | 3253409 | G | R | 3296718 | C | G | 3291041 | C | G | Yes | NS, NC | P96284 | enzyme activity |
| 1357 | 3257940 | T | T | 3301249 | C | A | 3295572 | C | A | Yes | NS, NC | P95141 | enzyme activity |
| 1358 | 3259371 | T | Null | 3302680 | C | Null | 3297003 | C | null | Yes | nc, NULL | Null | — |
| 1359 | 3265154 | T | H | 3308463 | C | R | 3302785 | C | R | Yes | NS, NC | P95137 | — |
| 1360 | 3265769 | A | E | 3309078 | G | E | 3303400 | G | E | Yes | S, NULL | Null | — |
| 1361 | 3266065 | C | T | 3309374 | T | I | 3303696 | T | I | Yes | NS, NC | P95136 | — |
| 1362 | 3267563 | A | Null | 3310872 | G | Null | 3305194 | G | null | Yes | S, NULL | Null | — |
| 1363 | 3267807 | C | D | 3311116 | G | D | 3305438 | G | D | Yes | S, NULL | Null | — |
| 1364 | 3269417 | T | V | 3312725 | C | V | 3307047 | C | V | Yes | S, NULL | Null | — |
| 1365 | 3271101 | G | A | 3314409 | A | A | 3308731 | A | A | Yes | S, NULL | Null | — |
| 1366 | 3277243 | A | S | 3320551 | G | S | 3314873 | G | S | Yes | S, NULL | Null | — |
| 1367 | 3283243 | C | H | 3326551 | A | N | 3320873 | A | N | Yes | NS, NC | P95124 | — |
| 1368 | 3291984 | C | G | 3335294 | T | D | 3329616 | T | D | Yes | NS, NC | P95116 | recombinase activity |
| 1369 | 3292201 | C | A | 3335511 | T | T | 3329833 | T | T | Yes | NS, NC | P95116 | recombinase activity |
| 1370 | 3292395 | C | R | 3335705 | G | P | 3330027 | G | P | Yes | NS, NC | P95116 | recombinase activity |
| 1371 | 3301607 | T | E | 3345044 | G | D | 3339424 | G | D | Yes | NS, C | O53237 | 3-isopropylmalate |
| | | | | | | | | | | | | | dehydratase activity |
| 1372 | 3303630 | T | E | 3347067 | G | A | 3341447 | G | A | Yes | NS, NC | O53239 | — |
| 1373 | 3304818 | A | T | 3348255 | G | A | 3342635 | G | A | Yes | NS, NC | O53240 | — |
| 1374 | 3309535 | G | L | 3352916 | A | F | 3347295 | A | F | Yes | NS, NC | P95313 | 3-isopropylmalate |
| | | | | | | | | | | | | | dehydrogenase activity |
| 1375 | 3312033 | A | S | 3355414 | T | C | 3349793 | T | C | Yes | NS, NC | O53244 | — |
| 1376 | 3313133 | C | P | 3356514 | T | P | 3350893 | T | P | Yes | S, NULL | Null | — |
| 1377 | 3321979 | A | D | 3365361 | G | G | 3359739 | G | G | Yes | NS, NC | O53253 | — |
| 1378 | 3326484 | T | Null | 3369866 | G | Null | 3364244 | G | null | No | nc, NULL | Null | — |
| 1379 | 3327875 | C | V | 3371257 | T | I | 3365635 | T | I | Yes | NS, C | O53258 | amidase activity |
| 1380 | 3327980 | T | T | 3371362 | C | A | 3365740 | C | A | Yes | NS, NC | O53258 | amidase activity |
| 1381 | 3328016 | A | L | 3371398 | G | L | 3365776 | G | L | Yes | S, NULL | Null | — |
| 1382 | 3333886 | C | V | 3377268 | G | L | 3371647 | G | L | Yes | NS, C | P31500 | — |
| 1383 | 3338640 | T | G | 3382077 | C | G | 3377816 | C | G | Yes | S, NULL | Null | — |
| 1384 | 3339158 | T | T | 3382595 | C | A | 3378334 | C | A | Yes | NS, NC | P96354 | peroxidase activity |
| 1385 | 3343458 | C | Null | 3386895 | T | Null | 3382634 | T | null | Yes | nc, NULL | Null | — |
| 1386 | 3343463 | G | Null | 3386900 | A | Null | 3382639 | A | null | Yes | nc, NULL | Null | — |
| 1387 | 3343657 | A | V | 3387094 | G | A | 3382833 | G | A | Yes | NS, C | O53275 | electron transporter |
| | | | | | | | | | | | | | activity |
| 1388 | 3345242 | C | V | 3388679 | T | V | 3384418 | T | V | Yes | S, NULL | Null | — |
| 1389 | 3353514 | C | R | 3396951 | T | Q | 3392690 | T | Q | Yes | NS, NC | O53283 | — |
| 1390 | 3354831 | G | A | 3398268 | T | D | 3394007 | T | D | Yes | NS, NC | O53284 | — |
| 1391 | 3359515 | A | S | 3402952 | C | A | 3398691 | C | A | Yes | NS, NC | O53289 | phosphoserine |
| | | | | | | | | | | | | | phosphatase activity |
| 1392 | 3362817 | A | Null | 3406254 | G | Null | 3401993 | G | null | No | nc, NULL | Null | — |
| 1393 | 3366744 | A | R | 3410181 | G | R | 3405920 | G | R | Yes | S, NULL | Null | — |
| 1394 | 3371878 | G | Null | 3415329 | A | Null | 3411054 | A | null | Yes | nc, NULL | Null | — |
| 1395 | 3376988 | T | Y | 3420439 | C | Y | 3416164 | C | Y | Yes | S, NULL | Null | — |
| 1396 | 3377371 | G | G | 3420822 | A | D | 3416547 | A | D | Yes | NS, NC | P95099 | monooxygenase activity |
| 1397 | 3384993 | T | C | 3428443 | G | G | 3424236 | G | G | Yes | NS, NC | P95095 | cellular response to |
| | | | | | | | | | | | | | starvation |
| 1398 | 3385588 | C | P | 3429038 | T | L | 3424831 | T | L | Yes | NS, NC | P95095 | cellular response to |
| | | | | | | | | | | | | | starvation |
| 1399 | 3386152 | A | Null | 3429602 | G | Null | 3425395 | G | null | Yes | nc, NULL | Null | — |
| 1400 | 3392209 | G | Null | 3435659 | C | Null | 3431452 | C | null | Yes | nc, NULL | Null | — |
| 1401 | 3394933 | A | I | 3438383 | G | I | 3434176 | G | I | Yes | S, NULL | Null | — |
| 1402 | 3397089 | G | G | 3440539 | A | G | 3436332 | A | G | Yes | S, NULL | Null | — |
| 1403 | 3401113 | A | L | 3444563 | G | L | 3440356 | G | L | Yes | S, NULL | Null | — |
| 1404 | 3401886 | A | V | 3445336 | G | A | 3441129 | G | A | Yes | NS, C | P95078 | protein kinase activity |
| 1405 | 3404010 | A | C | 3447460 | G | R | 3443253 | G | R | Yes | NS, NC | Q06861 | DNA binding activity |
| 1406 | 3405330 | A | I | 3448780 | G | V | 3444573 | G | V | Yes | NS, C | O53300 | — |
| 1407 | 3409943 | G | A | 3453393 | A | T | 3449186 | A | T | Yes | NS, NC | O53304 | molecular_function |
| | | | | | | | | | | | | | unknown |
| 1408 | 3410810 | G | V | 3454260 | C | L | 3450053 | C | L | Yes | NS, C | O53304 | molecular_function |
| | | | | | | | | | | | | | unknown |
| 1409 | 3414061 | C | Null | 3457511 | G | Null | 3453304 | G | null | No | nc, NULL | Null | — |
| 1410 | 3417571 | C | M | 3461021 | T | I | 3456814 | T | I | Yes | NS, NC | O05771 | — |
| 1411 | 3421176 | G | G | 3464626 | A | E | 3460424 | A | E | Yes | NS, NC | O05775 | hydrolase activity |
| 1412 | 3423466 | G | A | 3466916 | C | G | 3462714 | C | G | Yes | NS, C | P77909 | enzyme activity |
| 1413 | 3423862 | C | E | 3467312 | G | D | 3463110 | G | D | Yes | NS, C | O05776 | — |
| 1414 | 3424012 | G | A | 3467462 | C | A | 3463260 | C | A | Yes | S, NULL | Null | — |
| 1415 | 3426715 | C | S | 3470165 | T | N | 3465963 | T | N | Yes | NS, C | P96293 | cytokinesis |
| 1416 | 3430975 | A | I | 3474424 | G | V | 3470223 | G | V | Yes | NS, C | O05783 | ferredoxin-NADP |
| | | | | | | | | | | | | | reductase activity |
| 1417 | 3431707 | G | D | 3475156 | A | N | 3470955 | A | N | Yes | NS, NC | O05783 | ferredoxin-NADP |
| | | | | | | | | | | | | | reductase activity |
| 1418 | 3434037 | G | V | 3477486 | A | I | 3473285 | A | I | Yes | NS, C | O05785 | — |
| 1419 | 3434151 | T | Null | 3477600 | C | Null | 3473399 | C | null | No | nc, NULL | Null | — |
| 1420 | 3435166 | G | A | 3478615 | A | T | 3474414 | A | T | Yes | NS, NC | O05786 | enzyme activity |
| 1421 | 3436346 | A | G | 3479795 | G | G | 3475594 | G | G | Yes | S, NULL | Null | — |
| 1422 | 3436653 | C | C | 3480103 | G | W | 3475902 | G | W | Yes | NS, NC | O05790 | metabolism |
| 1423 | 3437192 | G | R | 3480642 | T | L | 3476441 | T | L | Yes | NS, NC | O05790 | metabolism |
| 1424 | 3437336 | C | P | 3480786 | T | S | 3476585 | T | S | Yes | NS, NC | O05791 | zinc ion binding activity |
| 1425 | 3438022 | A | T | 3481472 | G | A | 3477271 | G | A | Yes | NS, NC | P96354 | peroxidase activity |
| 1426 | 3438540 | A | G | 3481990 | G | G | 3477789 | G | G | Yes | S, NULL | Null | — |
| 1427 | 3442328 | T | S | 3488553 | G | R | 3484352 | G | R | Yes | NS, NC | O07033 | — |
| 1428 | 3442459 | A | Q | 3488684 | G | R | 3484483 | G | R | Yes | NS, NC | O07034 | — |
| 1429 | 3443112 | G | Null | 3489337 | C | Null | 3485136 | C | null | No | nc, NULL | Null | — |
| 1430 | 3445311 | A | V | 3491536 | G | A | 3487335 | G | A | Yes | NS, C | O05798 | — |
| 1431 | 3446202 | G | C | 3492427 | T | F | 3488226 | T | F | Yes | NS, NC | O05800 | — |
| 1432 | 3447457 | C | G | 3493682 | A | V | 3489481 | A | null | Yes | NS, C | Not | — |
| | | | | | | | | | | | | annotated | |
| 1433 | 3452190 | G | T | 3498415 | A | I | 3494214 | A | I | Yes | NS, NC | P95194 | ATP binding activity |
| 1434 | 3456796 | T | Null | 3501684 | C | Null | 3497171 | C | null | Yes | S, NULL | Null | — |
| 1435 | 3459632 | A | N | 3504520 | G | S | 3500007 | G | S | Yes | NS, C | P95188 | lyase activity |
| 1436 | 3460073 | C | S | 3504961 | T | F | 3500448 | T | F | Yes | NS, NC | P95188 | lyase activity |
| 1437 | 3460112 | T | L | 3505000 | C | P | 3500487 | C | P | Yes | NS, NC | P95188 | lyase activity |
| 1438 | 3460114 | C | P | 3505002 | A | T | 3500489 | A | T | Yes | NS, NC | P95188 | lyase activity |
| 1439 | 3464200 | C | Null | 3509088 | G | Null | 3504575 | G | null | No | nc, NULL | Null | — |
| 1440 | 3464257 | C | Q | 3509145 | A | H | 3504632 | A | H | Yes | NS, NC | P95184 | — |
| 1441 | 3465229 | G | Q | 3510117 | T | K | 3505604 | T | K | Yes | NS, NC | P95182 | — |
| 1442 | 3466696 | G | Null | 3511584 | T | Null | 3507071 | T | null | No | nc, NULL | Null | — |
| 1443 | 3467191 | C | G | 3512079 | A | G | 3507566 | A | G | Yes | S, NULL | Null | — |
| 1444 | 3468833 | T | N | 3513721 | C | N | 3509208 | C | N | Yes | S, NULL | Null | — |
| 1445 | 3470134 | T | G | 3515022 | C | G | 3510509 | C | G | Yes | S, NULL | Null | — |
| 1446 | 3472676 | T | N | 3517564 | C | N | 3513051 | C | N | Yes | S, NULL | Null | — |
| 1447 | 3476153 | G | A | 3521041 | A | T | 3516528 | A | T | Yes | NS, NC | P95173 | electron transporter |
| | | | | | | | | | | | | | activity |
| 1448 | 3478232 | A | Y | 3523120 | T | F | 3518607 | T | F | Yes | NS, C | O86350 | oxidative |
| | | | | | | | | | | | | | phosphorylation |
| 1449 | 3480424 | A | D | 3525312 | G | G | 3520799 | G | G | Yes | NS, NC | O53307 | oxidative |
| | | | | | | | | | | | | | phosphorylation |
| 1450 | 3480666 | A | I | 3525554 | G | V | 3521041 | G | V | Yes | NS, C | O53307 | oxidative |
| | | | | | | | | | | | | | phosphorylation |
| 1451 | 3482095 | T | A | 3526983 | A | A | 3522470 | A | A | Yes | S, NULL | Null | — |
| 1452 | 3483661 | T | E | 3528549 | G | D | 3524036 | G | D | Yes | NS, C | O53309 | — |
| 1453 | 3488207 | G | L | 3530952 | C | V | 3528588 | C | V | Yes | NS, C | O53311 | iron ion binding activity |
| 1454 | 3489142 | T | E | 3531888 | G | D | 3529524 | G | D | Yes | NS, C | O53313 | transporter activity |
| 1455 | 3491098 | C | G | 3533844 | T | E | 3531480 | T | E | Yes | NS, NC | O53314 | — |
| 1456 | 3492231 | G | V | 3534977 | C | V | 3532613 | C | V | Yes | S, NULL | Null | — |
| 1457 | 3493545 | C | R | 3536291 | T | W | 3533927 | T | W | Yes | NS, NC | O53318 | — |
| 1458 | 3497395 | A | M | 3540141 | G | T | 3537777 | G | T | Yes | NS, NC | O53321 | enzyme activity |
| 1459 | 3499414 | C | A | 3542160 | T | V | 3539796 | T | V | Yes | NS, C | O53324 | metabolism |
| 1460 | 3500015 | C | L | 3542761 | G | L | 3540397 | G | L | Yes | S, NULL | Null | — |
| 1461 | 3510233 | G | A | 3555696 | A | V | 3550616 | A | V | Yes | NS, C | O53336 | — |
| 1462 | 3515180 | T | Q | 3560642 | C | R | 3555549 | C | R | Yes | NS, NC | O53339 | molecular_function |
| | | | | | | | | | | | | | unknown |
| 1463 | 3519984 | A | E | 3565446 | G | E | 3560353 | G | E | Yes | S, NULL | Null | — |
| 1464 | 3522549 | A | R | 3568001 | C | R | 3562908 | C | R | Yes | S, NULL | Null | — |
| 1465 | 3526379 | G | P | 3571831 | T | Q | 3566738 | T | Q | Yes | NS, NC | O53345 | magnesium ion binding |
| | | | | | | | | | | | | | activity |
| 1466 | 3528181 | C | D | 3573633 | T | N | 3568540 | T | N | Yes | NS, NC | O53346 | potassium channel |
| | | | | | | | | | | | | | activity |
| 1467 | 3532503 | G | A | 3577955 | A | V | 3572862 | A | V | Yes | NS, C | O53348 | DNA binding activity |
| 1468 | 3538731 | T | N | 3584187 | C | D | 3579093 | C | null | Yes | NS, NC | O05859 | proteolysis and |
| | | | | | | | | | | | | | peptidolysis |
| 1469 | 3542388 | C | A | 3587844 | T | V | 3582750 | T | V | Yes | NS, C | O05855 | nucleic acid binding |
| | | | | | | | | | | | | | activity |
| 1470 | 3544683 | C | A | 3590139 | T | V | 3585045 | T | V | Yes | NS, C | O05854 | — |
| 1471 | 3545177 | C | Null | 3590633 | G | Null | 3585539 | G | null | No | nc, NULL | Null | — |
| 1472 | 3545178 | G | Null | 3590634 | C | Null | 3585540 | C | null | No | nc, NULL | Null | — |
| 1473 | 3549450 | A | Q | 3594848 | G | Q | 3589751 | G | Q | Yes | S, NULL | Null | — |
| 1474 | 3550026 | A | R | 3595424 | G | R | 3590327 | G | R | Yes | S, NULL | Null | — |
| 1475 | 3551995 | T | N | 3597393 | C | D | 3592296 | C | D | Yes | NS, NC | O05846 | ATP binding activity |
| 1476 | 3556127 | T | T | 3601524 | C | A | 3596428 | C | A | Yes | NS, NC | O05841 | N-acetyltransferase |
| | | | | | | | | | | | | | activity |
| 1477 | 3558424 | A | H | 3603821 | G | R | 3598725 | G | R | Yes | NS, NC | P22487 | 3-phosphoshikimate 1- |
| | | | | | | | | | | | | | carboxyvinyltransferase |
| | | | | | | | | | | | | | activity |
| 1478 | 3561226 | A | L | 3606623 | G | L | 3601527 | G | L | Yes | S, NULL | Null | — |
| 1479 | 3562541 | A | C | 3607938 | G | R | 3602842 | G | R | Yes | NS, NC | O05875 | electron transporter |
| | | | | | | | | | | | | | activity |
| 1480 | 3563125 | A | V | 3608522 | G | V | 3603426 | G | V | Yes | S, NULL | Null | — |
| 1481 | 3566088 | C | G | 3611484 | G | G | 3606388 | G | G | Yes | S, NULL | Null | — |
| 1482 | 3569604 | T | H | 3615000 | C | R | 3609903 | C | R | Yes | NS, NC | O05884 | enzyme activity |
| 1483 | 3577972 | G | P | 3623368 | C | P | 3618271 | C | P | Yes | S, NULL | Null | — |
| 1484 | 3578330 | A | L | 3623726 | G | S | 3618629 | G | S | Yes | NS, NC | O05889 | — |
| 1485 | 3578950 | A | A | 3624346 | C | A | 3619249 | C | A | Yes | S, NULL | Null | — |
| 1486 | 3579086 | C | G | 3624482 | T | D | 3619385 | T | D | Yes | NS, NC | O05889 | — |
| 1487 | 3579193 | T | V | 3624589 | C | V | 3619492 | C | V | Yes | S, NULL | Null | — |
| 1488 | 3579310 | T | L | 3624706 | C | L | 3619609 | C | L | Yes | S, NULL | Null | — |
| 1489 | 3583683 | T | I | 3629079 | C | V | 3623982 | C | V | Yes | NS, C | O08364 | adenosylhomocysteinase |
| | | | | | | | | | | | | | activity |
| 1490 | 3592693 | A | L | 3638089 | G | S | 3632992 | G | S | Yes | NS, NC | O86374 | carbohydrate |
| | | | | | | | | | | | | | metabolism |
| 1491 | 3601629 | G | P | 3647037 | A | S | 3641940 | A | S | Yes | NS, NC | P96871 | dTDP-4- |
| | | | | | | | | | | | | | dehydrorhamnose |
| | | | | | | | | | | | | | reductase activity |
| 1492 | 3609075 | G | S | 3654483 | A | N | 3649386 | A | N | Yes | NS, C | P96877 | metabolism |
| 1493 | 3609941 | T | F | 3655349 | C | F | 3650252 | C | F | Yes | S, NULL | Null | — |
| 1494 | 3612854 | G | R | 3658262 | C | G | 3653165 | C | G | Yes | NS, NC | P96880 | phospho- |
| | | | | | | | | | | | | | ribosylaminoimidazole |
| | | | | | | | | | | | | | carboxylase |
| | | | | | | | | | | | | | activity |
| 1495 | 3615280 | T | L | 3660688 | C | S | 3655591 | C | S | Yes | NS, NC | P96882 | — |
| 1496 | 3615970 | T | N | 3661378 | C | D | 3656280 | C | D | Yes | NS, NC | P96884 | biotin-apoprotein ligase |
| | | | | | | | | | | | | | activity |
| 1497 | 3617992 | C | A | 3663400 | T | V | 3658302 | T | V | Yes | NS, C | P96885 | biotin carboxylase |
| | | | | | | | | | | | | | activity |
| 1498 | 3619140 | T | S | 3664611 | G | A | 3659450 | G | A | Yes | NS, NC | P96887 | — |
| 1499 | 3619961 | A | D | 3665432 | G | G | 3660271 | G | G | Yes | NS, NC | P96888 | thiosulfate |
| | | | | | | | | | | | | | sulfurtransferase |
| | | | | | | | | | | | | | activity |
| 1500 | 3621718 | T | H | 3667189 | C | H | 3662028 | C | H | Yes | S, NULL | Null | — |
| 1501 | 3622087 | C | G | 3667558 | T | G | 3662397 | T | G | Yes | S, NULL | Null | — |
| 1502 | 3624565 | T | A | 3670036 | C | A | 3664875 | C | A | Yes | S, NULL | Null | — |
| 1503 | 3626758 | A | V | 3672229 | G | A | 3667068 | G | A | Yes | NS, C | P96896 | DNA binding activity |
| 1504 | 3628943 | T | C | 3674414 | G | G | 3669253 | G | G | Yes | NS, NC | P96898 | metabolism |
| 1505 | 3633454 | A | M | 3678925 | G | V | 3673764 | G | V | Yes | NS, NC | P96901 | nucleotide binding |
| | | | | | | | | | | | | | activity |
| 1506 | 3633751 | A | N | 3679222 | G | D | 3674061 | G | D | Yes | NS, NC | P96901 | nucleotide binding |
| | | | | | | | | | | | | | activity |
| 1507 | 3634474 | G | E | 3679945 | A | K | 3674784 | A | K | Yes | NS, NC | P96901 | nucleotide binding |
| | | | | | | | | | | | | | activity |
| 1508 | 3636073 | C | R | 3681544 | A | R | 3676383 | A | R | Yes | S, NULL | Null | — |
| 1509 | 3639879 | T | S | 3685350 | C | G | 3680189 | C | G | Yes | NS, NC | O65931 | enzyme activity |
| 1510 | 3641272 | T | N | 3686743 | C | D | 3681582 | C | D | Yes | NS, NC | O07166 | pseudouridylate |
| | | | | | | | | | | | | | synthase activity |
| 1511 | 3644541 | G | S | 3690012 | A | L | 3684851 | A | L | Yes | NS, NC | O53355 | cytoplasm |
| 1512 | 3645379 | C | A | 3690850 | T | T | 3685689 | T | T | Yes | NS, NC | O53355 | cytoplasm |
| 1513 | 3648206 | C | A | 3693677 | A | A | 3688572 | A | A | Yes | S, NULL | Null | — |
| 1514 | 3650706 | G | G | 3696177 | A | S | 3691072 | A | S | Yes | NS, NC | O53360 | carbohydrate |
| | | | | | | | | | | | | | metabolism |
| 1515 | 3652233 | G | A | 3697704 | A | T | 3692599 | A | T | Yes | NS, NC | O53361 | hydrolase activity |
| 1516 | 3654880 | G | Null | 3700351 | A | Null | 3695243 | A | null | No | nc, NULL | Null | — |
| 1517 | 3657068 | A | W | 3702539 | G | R | 3697430 | G | R | Yes | NS, NC | O53366 | pyrimidine base |
| | | | | | | | | | | | | | metabolism |
| 1518 | 3659623 | A | V | 3705094 | G | V | 3699985 | G | V | Yes | S, NULL | Null | — |
| 1519 | 3660007 | A | E | 3705478 | G | E | 3700369 | G | E | Yes | S, NULL | Null | — |
| 1520 | 3661401 | G | E | 3706872 | C | D | 3701763 | C | D | Yes | NS, C | O53371 | electron transporter |
| | | | | | | | | | | | | | activity |
| 1521 | 3662101 | C | Null | 3707572 | G | Null | 3702463 | G | null | No | nc, NULL | Null | — |
| 1522 | 3662102 | G | Null | 3707573 | C | Null | 3702464 | C | null | No | nc, NULL | Null | — |
| 1523 | 3663410 | A | A | 3708884 | G | A | 3703775 | G | A | Yes | S, NULL | Null | — |
| 1524 | 3671821 | T | L | 3714568 | C | L | 3712186 | C | L | Yes | S, NULL | Null | — |
| 1525 | 3672930 | T | D | 3715677 | C | D | 3713295 | C | D | Yes | S, NULL | Null | — |
| 1526 | 3673148 | A | V | 3715895 | G | V | 3713513 | G | V | Yes | S, NULL | Null | — |
| 1527 | 3687716 | G | T | 3730462 | A | I | 3728072 | A | null | Yes | NS, NC | O53393 | carboxypeptidase A |
| | | | | | | | | | | | | | activity |
| 1528 | 3693443 | G | A | 3740060 | T | E | 3732216 | T | E | Yes | NS, NC | O53395 | — |
| 1529 | 3693692 | A | V | 3740309 | C | G | 3732465 | C | G | Yes | NS, C | O53395 | — |
| 1530 | 3696063 | A | T | 3742525 | G | T | 3734759 | G | T | Yes | S, NULL | Null | — |
| 1531 | 3697083 | G | Null | 3743545 | A | Null | 3735779 | A | null | No | nc, NULL | Null | — |
| 1532 | 3699350 | T | N | 3745812 | C | D | 3738047 | C | null | Yes | NS, NC | O50378 | — |
| 1533 | 3700460 | C | W | 3746922 | T | W | 3739156 | T | null | Yes | S, NULL | Null | — |
| 1534 | 3701886 | G | A | 3748349 | C | G | 3740583 | C | null | Yes | NS, C | O50378 | — |
| 1535 | 3703453 | A | S | 3749916 | G | P | 3742150 | G | null | Yes | NS, NC | O50378 | — |
| 1536 | 3703940 | C | G | 3750403 | G | G | 3742637 | G | null | Yes | S, NULL | Null | — |
| 1537 | 3703950 | T | Y | 3750413 | A | F | 3742647 | A | null | Yes | NS, C | O50378 | — |
| 1538 | 3703954 | C | G | 3750417 | T | S | 3742651 | T | null | Yes | NS, NC | O50378 | — |
| 1539 | 3704386 | G | L | 3750849 | A | L | 3743083 | A | null | Yes | S, NULL | Null | — |
| 1540 | 3704564 | G | G | 3751027 | A | G | 3743261 | A | null | Yes | S, NULL | Null | — |
| 1541 | 3704570 | G | N | 3751033 | A | N | 3743267 | A | null | Yes | S, NULL | Null | — |
| 1542 | 3706162 | T | I | 3752625 | G | L | 3744859 | G | null | Yes | NS, C | O50378 | — |
| 1543 | 3706947 | G | Null | 3753410 | T | Null | 3745645 | T | null | Yes | nc, NULL | Null | — |
| 1544 | 3708970 | A | Null | 3755439 | G | Null | 3747674 | G | null | No | nc, NULL | Null | — |
| 1545 | 3711573 | T | S | 3758042 | C | S | 3750277 | C | null | Yes | S, NULL | Null | — |
| 1546 | 3715389 | A | V | 3761859 | G | A | 3754086 | G | null | Yes | NS, C | O50379 | — |
| 1547 | 3717907 | C | D | 3764377 | T | N | 3756604 | T | null | Yes | NS, NC | O50379 | — |
| 1548 | 3719141 | C | A | 3765611 | G | A | 3757838 | G | null | Yes | S, NULL | Null | — |
| 1549 | 3719324 | T | Null | 3765794 | G | Null | 3758021 | G | null | Yes | S, NULL | Null | — |
| 1550 | 3719936 | G | G | 3766406 | C | G | 3758633 | C | null | Yes | S, NULL | Null | — |
| 1551 | 3720790 | G | Null | 3767260 | A | Null | 3759487 | A | null | No | nc, NULL | Null | — |
| 1552 | 3722971 | C | A | 3769441 | T | V | 3761668 | T | V | Yes | NS, C | O50383 | — |
| 1553 | 3724114 | G | P | 3770584 | T | Q | 3762811 | T | Q | Yes | NS, NC | O50385 | enzyme activity |
| 1554 | 3724214 | T | Null | 3770684 | C | Null | 3762911 | C | null | No | nc, NULL | Null | — |
| 1555 | 3724771 | A | L | 3771241 | G | L | 3763468 | G | L | Yes | S, NULL | Null | — |
| 1556 | 3724938 | G | R | 3771408 | T | R | 3763635 | T | R | Yes | S, NULL | Null | — |
| 1557 | 3725154 | C | I | 3771624 | A | I | 3763851 | A | I | Yes | S, NULL | Null | — |
| 1558 | 3726142 | A | Null | 3772612 | G | Null | 3764839 | G | null | No | nc, NULL | Null | — |
| 1559 | 3729791 | T | R | 3776261 | G | R | 3768488 | G | R | Yes | S, NULL | Null | — |
| 1560 | 3733435 | A | S | 3779791 | G | G | 3772027 | G | G | Yes | NS, NC | O50396 | — |
| 1561 | 3736194 | A | S | 3782550 | G | S | 3774786 | G | S | Yes | S, NULL | Null | — |
| 1562 | 3736445 | T | R | 3782801 | G | R | 3775037 | G | R | Yes | S, NULL | Null | — |
| 1563 | 3739586 | G | G | 3785942 | A | R | 3778178 | A | R | Yes | NS, NC | O50400 | molecular_function |
| | | | | | | | | | | | | | unknown |
| 1564 | 3739673 | G | V | 3786029 | A | I | 3778265 | A | I | Yes | NS, C | O50400 | molecular_function |
| | | | | | | | | | | | | | unknown |
| 1565 | 3742005 | G | G | 3788361 | T | * | 3780597 | T | null | Yes | NS, TP | O50402 | enzyme activity |
| 1566 | 3746351 | T | T | 3792708 | C | T | 3784944 | C | T | Yes | S, NULL | Null | — |
| 1567 | 3747920 | T | Y | 3794277 | C | C | 3786513 | C | null | Yes | NS, NC | O50408 | — |
| 1568 | 3752240 | G | Null | 3799953 | A | Null | 3790831 | A | null | No | nc, NULL | Null | — |
| 1569 | 3755845 | C | A | 3803582 | G | G | 3794460 | G | G | Yes | NS, C | O50415 | — |
| 1570 | 3756614 | A | L | 3804273 | G | P | 3795151 | G | P | Yes | NS, NC | Q11198 | metabolism |
| 1571 | 3760440 | C | S | 3808099 | T | N | 3798977 | T | N | Yes | NS, C | Q11195 | methyltransferase |
| | | | | | | | | | | | | | activity |
| 1572 | 3763664 | T | M | 3811323 | C | V | 3802201 | C | V | Yes | NS, NC | Q50730 | integral to membrane |
| 1573 | 3763966 | A | V | 3811625 | G | A | 3802503 | G | A | Yes | NS, C | Q50730 | integral to membrane |
| 1574 | 3766395 | A | I | 3814054 | G | I | 3804932 | G | I | Yes | S, NULL | Null | — |
| 1575 | 3772351 | A | H | 3820010 | G | R | 3810888 | G | R | Yes | NS, NC | Q50724 | carbohydrate |
| | | | | | | | | | | | | | metabolism |
| 1576 | 3773467 | C | Null | 3820835 | G | Null | 3811715 | G | null | Yes | S, NULL | Null | — |
| 1577 | 3774060 | A | C | 3821428 | G | R | 3812308 | G | R | Yes | NS, NC | Q50723 | — |
| 1578 | 3777374 | A | L | 3824742 | G | L | 3815622 | G | L | Yes | S, NULL | Null | — |
| 1579 | 3783323 | G | A | 3830691 | A | A | 3821571 | A | A | Yes | S, NULL | Null | — |
| 1580 | 3795810 | T | H | 3848104 | C | R | 3834058 | C | R | Yes | NS, NC | O06247 | DNA binding activity |
| 1581 | 3799589 | C | A | 3851883 | A | S | 3837836 | A | S | Yes | NS, NC | O06250 | molecular_function |
| | | | | | | | | | | | | | unknown |
| 1582 | 3799590 | C | A | 3851884 | T | A | 3837837 | T | A | Yes | S, NULL | Null | — |
| 1583 | 3801054 | T | T | 3853348 | C | A | 3839301 | C | A | Yes | NS, NC | O06251 | — |
| 1584 | 3804863 | C | P | 3857157 | T | L | 3843110 | T | L | Yes | NS, NC | O06254 | — |
| 1585 | 3805949 | T | Null | 3858243 | C | Null | 3844196 | C | null | No | nc, NULL | Null | — |
| 1586 | 3812465 | T | S | 3864760 | C | G | 3850712 | C | G | Yes | NS, NC | O06264 | nucleotide binding |
| | | | | | | | | | | | | | activity |
| 1587 | 3816846 | A | D | 3869141 | C | A | 3855093 | C | A | Yes | NS, NC | O33354 | transporter activity |
| 1588 | 3817926 | T | I | 3870221 | C | I | 3856173 | C | I | Yes | S, NULL | Null | — |
| 1589 | 3818947 | C | G | 3871242 | T | G | 3857194 | T | G | Yes | S, NULL | Null | — |
| 1590 | 3823086 | A | I | 3875382 | G | V | 3861333 | G | V | Yes | NS, C | O06321 | — |
| 1591 | 3824956 | T | A | 3877252 | C | A | 3863203 | C | A | Yes | S, NULL | Null | — |
| 1592 | 3826984 | A | N | 3879284 | C | K | 3865235 | C | K | Yes | NS, NC | O06326 | RNA binding activity |
| 1593 | 3831379 | C | V | 3883679 | G | V | 3869630 | G | V | Yes | S, NULL | Null | — |
| 1594 | 3831382 | G | G | 3883682 | T | G | 3869633 | T | G | Yes | S, NULL | Null | — |
| 1595 | 3831386 | A | T | 3883686 | G | A | 3869637 | G | A | Yes | NS, NC | O06331 | — |
| 1596 | 3831403 | C | L | 3883703 | T | L | 3869654 | T | L | Yes | S, NULL | Null | — |
| 1597 | 3831407 | A | T | 3883707 | G | A | 3869658 | G | A | Yes | NS, NC | O06331 | — |
| 1598 | 3831541 | C | G | 3883841 | T | G | 3869792 | T | G | Yes | S, NULL | Null | — |
| 1599 | 3831611 | A | I | 3883911 | G | V | 3869862 | G | V | Yes | NS, C | O06331 | — |
| 1600 | 3832059 | G | E | 3884359 | A | K | 3870310 | A | K | Yes | NS, NC | Q50655 | — |
| 1601 | 3832094 | T | I | 3884394 | C | I | 3870345 | C | I | Yes | S, NULL | Null | — |
| 1602 | 3832393 | G | G | 3884693 | C | A | 3870644 | C | A | Yes | NS, C | Q50655 | — |
| 1603 | 3832444 | A | D | 3884744 | G | G | 3870695 | G | G | Yes | NS, NC | Q50655 | — |
| 1604 | 3832483 | G | R | 3884783 | A | H | 3870734 | A | H | Yes | NS, NC | Q50655 | — |
| 1605 | 3832818 | A | N | 3885118 | G | N | 3880312 | G | N | Yes | S, NULL | Null | — |
| 1606 | 3835237 | T | E | 3887537 | C | G | 3882731 | C | G | Yes | NS, NC | O06335 | — |
| 1607 | 3836573 | C | W | 3888873 | G | C | 3884067 | G | C | Yes | NS, NC | O06336 | nutrient reservoir |
| | | | | | | | | | | | | | activity |
| 1608 | 3839628 | A | V | 3893286 | G | A | 3887122 | G | A | Yes | NS, C | O06339 | transporter activity |
| 1609 | 3839818 | A | F | 3893476 | G | L | 3887312 | G | L | Yes | NS, NC | O06339 | transporter activity |
| 1610 | 3840507 | T | V | 3894165 | C | A | 3888001 | C | A | Yes | NS, C | O06340 | — |
| 1611 | 3842065 | A | Null | 3895723 | C | Null | 3889559 | C | null | Yes | S, NULL | Null | — |
| 1612 | 3842157 | A | Null | 3895815 | G | Null | 3889651 | G | null | Yes | S, NULL | Null | — |
| 1613 | 3844494 | A | N | 3898865 | C | T | 3892701 | C | T | Yes | NS, C | O06342 | enzyme activity |
| 1614 | 3850113 | A | E | 3904486 | G | E | 3898322 | G | E | Yes | S, NULL | Null | — |
| 1615 | 3853581 | A | R | 3907954 | G | G | 3901790 | G | G | Yes | NS, NC | O06351 | — |
| 1616 | 3854858 | C | L | 3909231 | G | V | 3903067 | G | V | Yes | NS, C | O06353 | alpha |
| 1617 | 3858259 | C | G | 3912632 | T | D | 3906467 | T | D | Yes | NS, NC | O53539 | pathogenesis |
| 1618 | 3865062 | A | P | 3919435 | G | P | 3913270 | G | P | Yes | S, NULL | Null | — |
| 1619 | 3867127 | G | A | 3921500 | C | A | 3915336 | C | A | Yes | S, NULL | Null | — |
| 1620 | 3868459 | C | D | 3922832 | T | D | 3916668 | T | D | Yes | S, NULL | Null | — |
| 1621 | 3869973 | T | V | 3924346 | C | A | 3918182 | C | A | Yes | NS, C | O53550 | acyl-CoA |
| | | | | | | | | | | | | | dehydrogenase activity |
| 1622 | 3870019 | A | Q | 3924392 | G | Q | 3918228 | G | Q | Yes | S, NULL | Null | — |
| 1623 | 3874389 | G | G | 3928888 | A | D | 3922733 | A | D | Yes | NS, NC | O53552 | — |
| 1624 | 3875932 | A | G | 3930377 | C | G | 3924213 | C | G | Yes | S, NULL | Null | — |
| 1625 | 3876018 | G | G | 3930463 | A | D | 3924299 | A | D | Yes | NS, NC | O53552 | — |
| 1626 | 3908574 | C | Null | 3965355 | T | Null | 3957501 | T | null | No | nc, NULL | Null | — |
| 1627 | 3910673 | C | L | 3967454 | T | L | 3959600 | T | L | Yes | S, NULL | Null | — |
| 1628 | 3911467 | T | S | 3968248 | C | S | 3960394 | C | S | Yes | S, NULL | Null | — |
| 1629 | 3911833 | A | T | 3968614 | G | T | 3960760 | G | T | Yes | S, NULL | Null | — |
| 1630 | 3921125 | A | L | 3977906 | G | L | 3970052 | G | L | Yes | S, NULL | Null | — |
| 1631 | 3927536 | A | H | 3984317 | G | H | 3976463 | G | H | Yes | S, NULL | Null | — |
| 1632 | 3930860 | C | V | 3987641 | T | M | 3979787 | T | M | Yes | NS, NC | P71853 | metabolism |
| 1633 | 3933129 | T | S | 3989910 | G | A | 3982056 | G | A | Yes | NS, NC | P71850 | metabolism |
| 1634 | 3938113 | G | R | 3994894 | A | W | 3987040 | A | null | Yes | NS, NC | P96837 | — |
| 1635 | 3939862 | C | G | 3996643 | G | G | 3988788 | G | G | Yes | S, NULL | Null | — |
| 1636 | 3942989 | A | V | 3999770 | G | A | 3991914 | G | V | Yes | NS, C | P96841 | metabolism |
| 1637 | 3946062 | A | N | 4002843 | C | T | 3994987 | C | T | Yes | NS, C | P96843 | enzyme activity |
| 1638 | 3947819 | G | R | 4004600 | A | Q | 3996744 | A | Q | Yes | NS, NC | P96845 | structural constituent of |
| | | | | | | | | | | | | | ribosome |
| 1639 | 3948329 | C | S | 4005110 | G | W | 3997254 | G | W | Yes | NS, NC | P96845 | structural constituent of |
| | | | | | | | | | | | | | ribosome |
| 1640 | 3951962 | G | T | 4008744 | A | I | 4000886 | A | I | Yes | NS, NC | P96849 | electron transport |
| 1641 | 3952885 | C | R | 4009667 | T | Q | 4001809 | T | Q | Yes | NS, NC | P96850 | enzyme activity |
| 1642 | 3955434 | C | D | 4012216 | T | N | 4004358 | T | N | Yes | NS, NC | P96852 | — |
| 1643 | 3961924 | A | N | 4018706 | G | D | 4010848 | G | D | Yes | NS, NC | P96858 | — |
| 1644 | 3964308 | T | S | 4021090 | G | A | 4013232 | G | A | Yes | NS, NC | P96860 | arsenite transporter |
| | | | | | | | | | | | | | activity |
| 1645 | 3964705 | G | A | 4021486 | T | E | 4013628 | T | E | Yes | NS, NC | P96861 | RNA binding activity |
| 1646 | 3964973 | T | R | 4021754 | G | R | 4013896 | G | R | Yes | S, NULL | Null | — |
| 1647 | 3965078 | T | M | 4021859 | C | V | 4014001 | C | V | Yes | NS, NC | P96861 | RNA binding activity |
| 1648 | 3967982 | C | A | 4024763 | T | T | 4016905 | T | T | Yes | NS, NC | P96864 | isoprenoid biosynthesis |
| 1649 | 3971967 | G | A | 4028749 | A | T | 4020891 | A | T | Yes | NS, NC | O53571 | DNA binding activity |
| 1650 | 3972140 | T | D | 4028922 | G | E | 4021064 | G | E | Yes | NS, C | O53571 | DNA binding activity |
| 1651 | 3973474 | G | T | 4030256 | A | I | 4022398 | A | I | Yes | NS, NC | O53573 | carbonate dehydratase |
| | | | | | | | | | | | | | activity |
| 1652 | 3978123 | G | S | 4034905 | A | N | 4027047 | A | N | Yes | NS, C | O06155 | — |
| 1653 | 3978196 | A | Q | 4034978 | G | Q | 4027120 | G | Q | Yes | S, NULL | Null | — |
| 1654 | 3981644 | G | L | 4038400 | A | L | 4030533 | A | L | Yes | S, NULL | Null | — |
| 1655 | 3989459 | A | Null | 4046215 | G | Null | 4038347 | G | null | Yes | nc, NULL | Null | — |
| 1656 | 3990280 | C | G | 4047036 | A | V | 4039168 | A | V | Yes | NS, C | O06278 | — |
| 1657 | 3990684 | C | G | 4047440 | A | G | 4039572 | A | G | Yes | S, NULL | Null | — |
| 1658 | 3991234 | A | G | 4047990 | G | G | 4040122 | G | G | Yes | S, NULL | Null | — |
| 1659 | 3997767 | G | G | 4054634 | A | G | 4046877 | A | G | Yes | S, NULL | Null | — |
| 1660 | 3997999 | T | K | 4054866 | C | K | 4047109 | C | K | Yes | S, NULL | Null | — |
| 1661 | 3999048 | G | A | 4055915 | A | V | 4048158 | A | V | Yes | NS, C | O06267 | — |
| 1662 | 3999546 | A | Null | 4056413 | C | Null | 4048656 | C | null | No | nc, NULL | Null | — |
| 1663 | 3999563 | G | Null | 4056430 | A | Null | 4048673 | A | null | No | nc, NULL | Null | — |
| 1664 | 3999617 | C | Null | 4056484 | T | Null | 4048727 | T | null | Yes | nc, NULL | Null | — |
| 1665 | 4004281 | A | V | 4067041 | G | A | 4059284 | G | A | Yes | NS, C | O06380 | serine |
| | | | | | | | | | | | | | carboxypeptidase |
| | | | | | | | | | | | | | activity |
| 1666 | 4004389 | A | V | 4067149 | G | A | 4059392 | G | A | Yes | NS, C | O06380 | serine |
| | | | | | | | | | | | | | carboxypeptidase |
| | | | | | | | | | | | | | activity |
| 1667 | 4006348 | T | Null | 4069108 | C | Null | 4061351 | C | null | No | nc, NULL | Null | — |
| 1668 | 4007724 | T | Null | 4070484 | G | Null | 4062727 | G | null | No | nc, NULL | Null | — |
| 1669 | 4013888 | T | I | 4076648 | C | I | 4068891 | C | null | Yes | S, NULL | Null | — |
| 1670 | 4015529 | G | N | 4078289 | T | K | 4070532 | T | K | Yes | NS, NC | O06368 | — |
| 1671 | 4016100 | T | E | 4078860 | C | G | 4071103 | C | G | Yes | NS, NC | O06367 | — |
| 1672 | 4017100 | G | Null | 4079860 | C | Null | 4072103 | C | null | No | nc, NULL | Null | — |
| 1673 | 4020748 | T | I | 4083508 | C | I | 4075752 | C | I | Yes | S, NULL | Null | — |
| 1674 | 4024907 | T | V | 4087667 | C | V | 4079911 | C | V | Yes | S, NULL | Null | — |
| 1675 | 4026295 | C | P | 4089055 | T | L | 4081299 | T | L | Yes | NS, NC | O06359 | nucleic acid binding |
| | | | | | | | | | | | | | activity |
| 1676 | 4027898 | T | H | 4090658 | C | H | 4082902 | C | H | Yes | S, NULL | Null | — |
| 1677 | 4032641 | C | E | 4095292 | T | E | 4087553 | T | E | Yes | S, NULL | Null | — |
| 1678 | 4033932 | A | A | 4096583 | G | A | 4088843 | G | A | Yes | S, NULL | Null | — |
| 1679 | 4036406 | A | L | 4099057 | G | P | 4091317 | G | null | Yes | NS, NC | O69628 | — |
| 1680 | 4037111 | C | P | 4099761 | T | S | 4092021 | T | S | Yes | NS, NC | O69629 | metabolism |
| 1681 | 4039283 | T | T | 4101933 | C | A | 4094193 | C | A | Yes | NS, NC | O69630 | — |
| 1682 | 4043080 | C | G | 4105730 | T | E | 4097990 | T | E | Yes | NS, NC | O69634 | transporter activity |
| 1683 | 4043104 | T | Q | 4105754 | C | R | 4098014 | C | R | Yes | NS, NC | O69634 | transporter activity |
| 1684 | 4044421 | C | R | 4107071 | T | Q | 4099331 | T | Q | Yes | NS, NC | O69634 | transporter activity |
| 1685 | 4045320 | A | E | 4107970 | G | G | 4100230 | G | G | Yes | NS, NC | O69635 | enzyme activity |
| 1686 | 4049776 | C | V | 4112426 | T | I | 4104686 | T | I | Yes | NS, C | O69639 | serine-type |
| | | | | | | | | | | | | | endopeptidase activity |
| 1687 | 4054029 | C | L | 4116679 | T | L | 4108939 | T | L | Yes | S, NULL | Null | — |
| 1688 | 4054508 | A | Null | 4117158 | C | Null | 4109418 | C | null | No | nc, NULL | Null | — |
| 1689 | 4056593 | C | D | 4119243 | T | D | 4111501 | T | D | Yes | S, NULL | Null | — |
| 1690 | 4058330 | G | Null | 4120980 | A | Null | 4113238 | A | null | No | nc, NULL | Null | — |
| 1691 | 4059022 | T | Null | 4121672 | C | Null | 4113930 | C | null | No | nc, NULL | Null | — |
| 1692 | 4065667 | G | Q | 4128317 | C | E | 4120575 | C | E | Yes | NS, NC | O69653 | monooxygenase activity |
| 1693 | 4066936 | A | Null | 4129586 | C | Null | 4121844 | C | null | Yes | S, NULL | Null | — |
| 1694 | 4068058 | C | L | 4130708 | G | V | 4122966 | G | V | Yes | NS, C | O69657 | — |
| 1695 | 4072777 | T | T | 4135427 | C | T | 4127684 | C | T | Yes | S, NULL | Null | — |
| 1696 | 4073901 | A | L | 4136551 | G | L | 4128808 | G | L | Yes | S, NULL | Null | — |
| 1697 | 4075724 | G | A | 4138374 | A | V | 4130631 | A | V | Yes | NS, C | O69664 | glycerol kinase activity |
| 1698 | 4076324 | G | A | 4138974 | C | G | 4131231 | C | G | Yes | NS, C | O69664 | glycerol kinase activity |
| 1699 | 4077491 | T | R | 4140140 | C | G | 4132397 | C | G | Yes | NS, NC | O69665 | — |
| 1700 | 4077846 | C | R | 4140495 | A | R | 4132752 | A | R | Yes | S, NULL | Null | — |
| 1701 | 4078038 | C | I | 4140687 | G | M | 4132944 | G | M | Yes | NS, NC | O69666 | — |
| 1702 | 4078538 | G | R | 4141187 | C | P | 4133444 | C | P | Yes | NS, NC | O69666 | — |
| 1703 | 4083085 | G | Y | 4145734 | A | Y | 4137991 | A | Y | Yes | S, NULL | Null | — |
| 1704 | 4091572 | A | H | 4154221 | C | P | 4146478 | C | P | Yes | NS, NC | P96420 | enzyme activity |
| 1705 | 4092200 | T | V | 4154849 | G | V | 4147106 | G | V | Yes | S, NULL | Null | — |
| 1706 | 4093758 | G | A | 4156236 | A | V | 4148493 | A | V | Yes | NS, C | O69678 | DNA-directed DNA |
| | | | | | | | | | | | | | polymerase activity |
| 1707 | 4094022 | T | D | 4156500 | C | G | 4148757 | C | G | Yes | NS, NC | O69678 | DNA-directed DNA |
| | | | | | | | | | | | | | polymerase activity |
| 1708 | 4095038 | A | S | 4157575 | G | G | 4149891 | G | G | Yes | NS, NC | O69679 | ATP binding activity |
| 1709 | 4095492 | C | T | 4158029 | A | K | 4150345 | A | K | Yes | NS, NC | O69679 | ATP binding activity |
| 1710 | 4095821 | G | P | 4158358 | A | P | 4150674 | A | P | Yes | S, NULL | Null | — |
| 1711 | 4101540 | A | Q | 4164077 | G | Q | 4156393 | G | Q | Yes | S, NULL | Null | — |
| 1712 | 4107289 | A | V | 4169827 | G | V | 4162142 | G | V | Yes | S, NULL | Null | — |
| 1713 | 4108573 | C | P | 4171110 | T | P | 4163425 | T | P | Yes | S, NULL | Null | — |
| 1714 | 4109633 | C | S | 4172170 | A | R | 4164485 | A | R | Yes | NS, NC | O69693 | alcohol dehydrogenase |
| | | | | | | | | | | | | | activity |
| 1715 | 4110670 | A | M | 4173207 | G | V | 4165522 | G | V | Yes | NS, NC | O69694 | — |
| 1716 | 4113722 | A | R | 4176259 | G | G | 4168574 | G | G | Yes | NS, NC | O69695 | enzyme activity |
| 1717 | 4116252 | A | I | 4178789 | G | V | 4171104 | G | V | Yes | NS, C | O69696 | S-adenosylmethionine- |
| | | | | | | | | | | | | | dependent |
| | | | | | | | | | | | | | methyltransferase |
| | | | | | | | | | | | | | activity |
| 1718 | 4116549 | T | S | 4179086 | C | P | 4171401 | C | P | Yes | NS, NC | O69696 | S-adenosylmethionine- |
| | | | | | | | | | | | | | dependent |
| | | | | | | | | | | | | | methyltransferase |
| | | | | | | | | | | | | | activity |
| 1719 | 4118314 | C | G | 4180851 | G | G | 4173166 | G | G | Yes | S, NULL | Null | — |
| 1720 | 4118737 | A | F | 4181274 | G | F | 4173589 | G | F | Yes | S, NULL | Null | — |
| 1721 | 4121062 | T | A | 4183599 | C | A | 4175914 | C | A | Yes | S, NULL | Null | — |
| 1722 | 4126515 | A | R | 4189052 | C | R | 4181367 | C | R | Yes | S, NULL | Null | — |
| 1723 | 4127210 | A | C | 4190913 | G | R | 4183228 | G | R | Yes | NS, NC | O69707 | molecular_function |
| | | | | | | | | | | | | | unknown |
| 1724 | 4131476 | A | C | 4195179 | G | C | 4187494 | G | C | Yes | S, NULL | Null | — |
| 1725 | 4132036 | T | A | 4195739 | C | A | 4188054 | C | A | Yes | S, NULL | Null | — |
| 1726 | 4133484 | G | Null | 4197186 | A | Null | 4189502 | A | null | Yes | nc, NULL | Null | — |
| 1727 | 4133850 | A | D | 4197552 | G | G | 4189868 | G | null | Yes | NS, NC | O69715 | — |
| 1728 | 4136514 | G | T | 4200217 | A | M | 4192532 | A | M | Yes | NS, NC | O69720 | — |
| 1729 | 4138677 | C | V | 4202380 | A | V | 4194695 | A | V | Yes | S, NULL | Null | — |
| 1730 | 4141141 | A | V | 4204844 | G | A | 4197159 | G | A | Yes | NS, C | O69725 | — |
| 1731 | 4144138 | G | H | 4207841 | A | Y | 4200156 | A | Y | Yes | NS, C | O69728 | — |
| 1732 | 4144689 | C | G | 4208392 | A | V | 4200707 | A | V | Yes | NS, C | O69728 | — |
| 1733 | 4147170 | C | R | 4210873 | T | H | 4203188 | T | H | Yes | NS, NC | O69729 | two-component sensor |
| | | | | | | | | | | | | | molecule activity |
| 1734 | 4148468 | C | Null | 4212171 | T | Null | 4204486 | T | null | No | nc, NULL | Null | — |
| 1735 | 4151295 | A | Null | 4214998 | C | Null | 4207313 | C | null | No | nc, NULL | Null | — |
| 1736 | 4151778 | C | A | 4215481 | G | P | 4207796 | G | P | Yes | NS, NC | P72037 | — |
| 1737 | 4152549 | G | R | 4216252 | C | Null | 4208567 | C | R | Yes | nc, NULL | Null | — |
| 1738 | 4153851 | G | A | 4217554 | A | T | 4209869 | A | T | Yes | NS, NC | P72039 | histidine biosynthesis |
| 1739 | 4158142 | T | A | 4221844 | C | A | 4214159 | C | A | Yes | S, NULL | Null | — |
| 1740 | 4165765 | C | Y | 4229467 | T | Y | 4221782 | T | Y | Yes | S, NULL | Null | — |
| 1741 | 4167728 | G | A | 4231430 | A | A | 4223746 | A | A | Yes | S, NULL | Null | — |
| 1742 | 4168622 | G | R | 4232324 | A | R | 4224640 | A | R | Yes | S, NULL | Null | — |
| 1743 | 4169929 | A | N | 4233631 | G | N | 4225947 | G | N | Yes | S, NULL | Null | — |
| 1744 | 4172445 | T | G | 4236147 | C | G | 4228463 | C | G | Yes | S, NULL | Null | — |
| 1745 | 4176574 | A | L | 4240276 | G | L | 4232591 | G | L | Yes | S, NULL | Null | — |
| 1746 | 4176966 | T | I | 4240668 | C | T | 4232983 | C | T | Yes | NS, NC | P72059 | cell wall |
| 1747 | 4179265 | T | T | 4242967 | C | T | 4235282 | C | T | Yes | S, NULL | Null | — |
| 1748 | 4180515 | T | L | 4244217 | C | L | 4236532 | C | L | Yes | S, NULL | Null | — |
| 1749 | 4182846 | G | S | 4246548 | A | N | 4238863 | A | N | Yes | NS, C | P72030 | cell wall |
| 1750 | 4183159 | T | V | 4246861 | C | V | 4239176 | C | V | Yes | S, NULL | Null | — |
| 1751 | 4183941 | C | A | 4247643 | A | E | 4239958 | A | E | Yes | NS, NC | P72030 | cell wall |
| 1752 | 4187131 | T | I | 4250833 | C | T | 4243148 | C | T | Yes | NS, NC | P72062 | hydrolase activity |
| 1753 | 4187592 | C | G | 4251294 | G | G | 4243609 | G | G | Yes | S, NULL | Null | — |
| 1754 | 4195852 | C | G | 4259576 | G | A | 4251901 | G | A | Yes | NS, C | O53579 | enzyme activity |
| 1755 | 4197772 | A | V | 4261496 | G | A | 4253821 | G | A | Yes | NS, C | O53580 | enzyme activity |
| 1756 | 4199552 | G | Null | 4263276 | A | Null | 4255601 | A | null | No | nc, NULL | Null | — |
| 1757 | 4201999 | C | G | 4265723 | G | G | 4258048 | G | G | Yes | S, NULL | Null | — |
| 1758 | 4204131 | C | V | 4267855 | T | I | 4260180 | T | I | Yes | NS, C | O53582 | — |
| 1759 | 4205624 | A | A | 4269348 | G | A | 4261673 | G | A | Yes | S, NULL | Null | — |
| 1760 | 4205660 | G | D | 4269384 | T | E | 4261709 | T | E | Yes | NS, C | O53583 | membrane |
| 1761 | 4205879 | G | R | 4269603 | A | R | 4261928 | A | R | Yes | S, NULL | Null | — |
| 1762 | 4209847 | G | Null | 4273571 | T | Null | 4265896 | T | null | No | nc, NULL | Null | — |
| 1763 | 4214379 | A | Null | 4278103 | G | Null | 4270428 | G | null | Yes | nc, NULL | Null | — |
| 1764 | 4214597 | C | Null | 4278321 | G | Null | 4270646 | G | null | No | nc, NULL | Null | — |
| 1765 | 4215241 | G | T | 4278965 | A | M | 4271290 | A | M | Yes | NS, NC | O07810 | molecular_function |
| | | | | | | | | | | | | | unknown |
| 1766 | 4217784 | A | L | 4281508 | G | L | 4273833 | G | L | Yes | S, NULL | Null | — |
| 1767 | 4220711 | A | I | 4284435 | G | T | 4276760 | G | T | Yes | NS, NC | O07803 | molecular_function |
| | | | | | | | | | | | | | unknown |
| 1768 | 4222561 | A | N | 4286285 | G | D | 4278610 | G | D | Yes | NS, NC | O07802 | — |
| 1769 | 4222603 | A | T | 4286327 | G | A | 4278652 | G | A | Yes | NS, NC | O07802 | — |
| 1770 | 4223157 | A | Y | 4286881 | G | C | 4279206 | G | C | Yes | NS, NC | O07801 | — |
| 1771 | 4223301 | C | T | 4287025 | A | N | 4279350 | A | N | Yes | NS, C | O07801 | — |
| 1772 | 4223437 | G | G | 4287161 | A | G | 4279486 | A | G | Yes | S, NULL | Null | — |
| 1773 | 4223634 | T | V | 4287358 | C | A | 4279683 | C | A | Yes | NS, C | O07801 | — |
| 1774 | 4226226 | G | A | 4289950 | A | V | 4282275 | A | V | Yes | NS, C | O07800 | membrane |
| 1775 | 4226837 | T | A | 4290561 | G | A | 4282886 | G | A | Yes | S, NULL | Null | — |
| 1776 | 4227100 | G | R | 4290824 | C | G | 4283149 | C | G | Yes | NS, NC | O07800 | membrane |
| 1777 | 4228368 | A | A | 4292092 | C | A | 4284417 | C | A | Yes | S, NULL | Null | — |
| 1778 | 4238583 | C | L | 4302307 | A | L | 4294632 | A | L | Yes | S, NULL | Null | — |
| 1779 | 4241120 | A | D | 4304844 | C | E | 4297169 | C | E | Yes | NS, C | O07794 | — |
| 1780 | 4241350 | A | T | 4305074 | G | T | 4297399 | G | T | Yes | S, NULL | Null | — |
| 1781 | 4247232 | A | Null | 4310955 | G | Null | 4303280 | G | null | No | nc, NULL | Null | — |
| 1782 | 4249402 | T | S | 4313125 | C | P | 4305450 | C | P | Yes | NS, NC | P96239 | — |
| 1783 | 4252596 | T | H | 4316319 | C | R | 4308644 | C | R | Yes | NS, NC | P96235 | — |
| 1784 | 4252840 | G | R | 4316563 | C | G | 4308888 | C | G | Yes | NS, NC | P96235 | — |
| 1785 | 4254698 | G | Null | 4318421 | T | Null | 4310746 | T | null | Yes | nc, NULL | Null | — |
| 1786 | 4257590 | C | T | 4321314 | T | I | 4313640 | T | I | Yes | NS, NC | P17670 | superoxide dismutase |
| | | | | | | | | | | | | | activity |
| 1787 | 4259178 | A | I | 4322902 | G | V | 4315228 | G | V | Yes | NS, C | P96229 | molecular_function |
| | | | | | | | | | | | | | unknown |
| 1788 | 4259279 | A | A | 4323003 | G | A | 4315329 | G | A | Yes | S, NULL | Null | — |
| 1789 | 4266055 | A | Null | 4329779 | G | Null | 4322105 | G | null | Yes | nc, NULL | Null | — |
| 1790 | 4266511 | T | H | 4330235 | C | R | 4322561 | C | R | Yes | NS, NC | P96219 | monooxygenase activity |
| 1791 | 4270698 | C | E | 4334422 | G | Q | 4326748 | G | Q | Yes | NS, NC | P96218 | glutamate biosynthesis |
| 1792 | 4272870 | A | Null | 4336594 | C | Null | 4328920 | C | null | No | nc, NULL | Null | — |
| 1793 | 4273741 | C | A | 4337465 | T | V | 4329791 | T | V | Yes | NS, C | P96217 | — |
| 1794 | 4280361 | T | V | 4344038 | C | A | 4336363 | C | A | Yes | NS, C | O69733 | nucleotide binding |
| | | | | | | | | | | | | | activity |
| 1795 | 4293145 | A | K | 4356822 | G | E | 4349146 | G | E | Yes | NS, NC | O69742 | — |
| 1796 | 4293741 | A | G | 4357418 | G | G | 4349742 | G | G | Yes | S, NULL | Null | — |
| 1797 | 4294795 | A | P | 4358472 | C | P | 4350796 | C | P | Yes | S, NULL | Null | — |
| 1798 | 4300168 | A | L | 4363800 | G | L | 4356106 | G | L | Yes | S, NULL | Null | — |
| 1799 | 4301014 | C | A | 4364646 | T | T | 4356952 | T | T | Yes | NS, NC | O05461 | subtilase activity |
| 1800 | 4304014 | G | Y | 4367646 | A | Y | 4359952 | A | Y | Yes | S, NULL | Null | — |
| 1801 | 4304489 | G | P | 4368121 | A | L | 4360427 | A | L | Yes | NS, NC | O05459 | — |
| 1802 | 4307013 | C | G | 4370645 | T | D | 4362949 | T | D | Yes | NS, NC | O05457 | — |
| 1803 | 4308186 | C | A | 4374225 | T | T | 4366529 | T | T | Yes | NS, NC | O05453 | — |
| 1804 | 4310990 | C | S | 4377030 | G | S | 4369334 | G | S | Yes | S, NULL | Null | — |
| 1805 | 4313166 | T | R | 4379205 | C | R | 4371509 | C | R | Yes | S, NULL | Null | — |
| 1806 | 4314838 | C | G | 4380877 | T | D | 4373181 | T | D | Yes | NS, NC | O05449 | — |
| 1807 | 4316253 | C | V | 4382293 | T | I | 4374597 | T | I | Yes | NS, C | O05448 | — |
| 1808 | 4316561 | C | G | 4382601 | T | D | 4374905 | T | D | Yes | NS, NC | O05448 | — |
| 1809 | 4316925 | T | Null | 4382965 | C | Null | 4375269 | C | null | No | nc, NULL | Null | — |
| 1810 | 4317617 | G | Q | 4383652 | A | * | 4375961 | A | * | Yes | NS, TP | O05447 | — |
| 1811 | 4317969 | G | Null | 4384004 | C | Null | 4376313 | C | null | No | nc, NULL | Null | — |
| 1812 | 4319148 | G | P | 4385184 | A | S | 4377493 | A | S | Yes | NS, NC | O05446 | — |
| 1813 | 4320218 | C | A | 4386254 | G | P | 4378563 | G | P | Yes | NS, NC | O05445 | — |
| 1814 | 4320714 | C | W | 4386750 | A | L | 4379059 | A | L | Yes | NS, NC | O05444 | — |
| 1815 | 4324427 | C | V | 4390463 | T | M | 4382772 | T | M | Yes | NS, NC | O05441 | — |
| 1816 | 4324820 | T | * | 4390856 | C | W | 4383165 | C | W | Yes | NS, TP | O05440 | — |
| 1817 | 4327799 | T | L | 4393835 | C | L | 4386144 | C | L | Yes | S, NULL | Null | — |
| 1818 | 4328171 | C | R | 4394207 | G | G | 4386516 | G | R | Yes | NS, NC | O05436 | — |
| 1819 | 4328226 | C | A | 4394262 | G | G | 4386571 | G | A | Yes | NS, C | O05436 | — |
| 1820 | 4329348 | G | S | 4395384 | A | N | 4387692 | A | N | Yes | NS, C | O05436 | — |
| 1821 | 4329765 | T | V | 4395801 | C | A | 4388109 | C | A | Yes | NS, C | O05436 | — |
| 1822 | 4331996 | C | A | 4398032 | T | V | 4390340 | T | V | Yes | NS, C | O05435 | pathogenesis |
| 1823 | 4334624 | T | S | 4400660 | C | S | 4392968 | G | A | Yes | S, NULL | Null | — |
| 1824 | 4335857 | G | G | 4401894 | A | D | 4394201 | A | D | Yes | NS, NC | P52214 | thioredoxin reductase |
| | | | | | | | | | | | | | (NADPH) activity |
| 1825 | 4339065 | C | R | 4405102 | T | R | 4397409 | T | R | Yes | S, NULL | Null | — |
| 1826 | 4341548 | C | A | 4407585 | T | A | 4399892 | T | A | Yes | S, NULL | Null | — |
| 1827 | 4342530 | A | W | 4408567 | G | R | 4400874 | G | R | Yes | NS, NC | O53598 | nucleic acid binding |
| | | | | | | | | | | | | | activity |
| 1828 | 26940 | G | Null | 26959 | C | Null | Null | Null | Null | No | Null, NC | Null | Null |
| 1829 | 34028 | C | Null | 34044 | T | Null | Null | Null | Null | No | Null, NC | Null | Null |

Table I: List of single nucleotide polymorphisms in Mycobacaterium tuberculosis/M. bovis BCG
Polymorphism ID: The ID by which the polymorphism can be identified
SNP Position: Position of the SNP in the respective genome
Base: The nucleotide occurring in the region of the polymorphism in the respective genome
AA: The aminoacid occurring in the region of the polymorphism in the respective genome
ORF: Indicates whether the polymorphism occurs in an open reading frame (yes) or not (no)
SNP type: Indicates the kind of SNP-S: synonymous SNP which codes for the same amino acid as the reference sequence; NS: non-synonymous SNP which codes for an aminoacid different from the reference sequence: C: conservative SNP coding for an aminoacid of the same family as the reference sequence: NC: nonconservative SNP coding for an aminoacid from a different family as the reference sequence
GO ID: The ID for the sequence in the gene ontology database
Putative function: The putative function of the gene in which the SNP occurs.

[0244] TABLE II
List of insertion/deletions in M. tuberculosis/M. bovis BCG

| | BCG | BCG | H37Rv | H37Rv | CDC | CDC | | | |
|---|---|---|---|---|---|---|---|---|---|
| Polymorphism ID | Start | End | start | end | start | end | ORF | GO ID | Putative Function |
| 1830 | 13233 | 13234 | 13233 | 13235 | 13233 | 13235 | YES | P71580 | integral to |
| | | | | | | | | | membrane |
| 1831 | 24719 | 24720 | 24720 | 24739 | 13233 | 13235 | YES | P71590 | — |
| 1832 | 28917 | 28918 | 28936 | 28938 | 13233 | 13235 | YES | P71594 | — |
| 1833 | 30962 | 30967 | 30982 | 30983 | 13233 | 13235 | YES | P71596 | — |
| 1834 | 42578 | 42588 | 42594 | 42595 | 13233 | 13235 | YES | P71697 | — |
| 1835 | 71576 | 71614 | 71584 | 71585 | 13233 | 13235 | YES | Null | — |
| 1836 | 79584 | 79594 | 79555 | 79556 | 13233 | 13235 | YES | O53616 | RNA binding |
| | | | | | | | | | activity |
| 1837 | 82490 | 82491 | 82452 | 82454 | 13233 | 13235 | YES | O53618 | nucleotide binding |
| | | | | | | | | | activity |
| 1838 | 125870 | 125872 | 125832 | 125833 | 13233 | 13235 | YES | Q10900 | magnesium ion |
| | | | | | | | | | binding activity |
| 1839 | 131213 | 131215 | 131174 | 131175 | 13233 | 13235 | YES | Null | — |
| 1840 | 138784 | 138786 | 138744 | 138745 | 13233 | 13235 | YES | O53637 | peroxidase activity |
| 1841 | 139598 | 139600 | 139557 | 139558 | 13233 | 13235 | YES | O53637 | peroxidase activity |
| 1842 | 147495 | 147496 | 147453 | 147455 | 13233 | 13235 | YES | O07170 | translation |
| | | | | | | | | | elongation factor |
| | | | | | | | | | activity |
| 1843 | 147853 | 147854 | 147812 | 147814 | 13233 | 13235 | YES | Null | — |
| 1844 | 150079 | 150080 | 150039 | 150067 | 13233 | 13235 | YES | O07174 | — |
| 1845 | 150906 | 151077 | 150893 | 150894 | 13233 | 13235 | YES | O07174 | — |
| 1846 | 162346 | 162347 | 162153 | 162155 | 13233 | 13235 | YES | P96811 | enzyme activity |
| 1847 | 162451 | 162453 | 162259 | 162260 | 13233 | 13235 | YES | P96811 | enzyme activity |
| 1848 | 162694 | 162695 | 162501 | 162503 | 13233 | 13235 | YES | P96811 | enzyme activity |
| 1849 | 194495 | 194498 | 194303 | 194304 | 13233 | 13235 | YES | O07410 | transcription factor |
| | | | | | | | | | activity |
| 1850 | 208509 | 208510 | 208315 | 208322 | 13233 | 13235 | YES | O07420 | — |
| 1851 | 223943 | 223945 | 223749 | 223750 | 13233 | 13235 | YES | O07436 | — |
| 1852 | 230770 | 230772 | 230575 | 230576 | 13233 | 13235 | YES | Null | — |
| 1853 | 234690 | 234693 | 234494 | 234495 | 13233 | 13235 | YES | O53648 | — |
| 1854 | 257984 | 258014 | 257786 | 257787 | 13233 | 13235 | YES | P96397 | acyl-CoA |
| | | | | | | | | | dehydrogenase |
| | | | | | | | | | activity |
| 1855 | 264979 | 264980 | 264752 | 266645 | 13233 | 13235 | YES | P96403, P96405 | — |
| 1856 | 265066 | 265068 | 266741 | 266742 | 13233 | 13235 | YES | P96405 | metabolism |
| 1857 | 291957 | 291959 | 293631 | 293632 | 13233 | 13235 | YES | Null | — |
| 1858 | 331998 | 331999 | 333671 | 333673 | 13233 | 13235 | YES | P56877 | — |
| 1859 | 332977 | 335748 | 334651 | 334652 | 13233 | 13235 | YES | P56877 | — |
| 1860 | 336706 | 336707 | 335600 | 335657 | 13233 | 13235 | YES | P56877 | — |
| 1861 | 336884 | 336885 | 335844 | 335863 | 13233 | 13235 | YES | P56877 | — |
| 1862 | 338180 | 338181 | 337158 | 337168 | 13233 | 13235 | YES | O53684 | — |
| 1863 | 339540 | 339541 | 338527 | 338537 | 13233 | 13235 | YES | O53684 | — |
| 1864 | 363810 | 363856 | 362806 | 362807 | 13233 | 13235 | YES | O07224 | intracellular |
| 1865 | 369162 | 369163 | 368113 | 368129 | 13233 | 13235 | YES | O07231 | tRNA ligase activity |
| 1866 | 370799 | 370800 | 369765 | 369767 | 13233 | 13235 | YES | O07231 | tRNA ligase activity |
| 1867 | 374314 | 374315 | 373281 | 373283 | 13233 | 13235 | YES | O07232 | — |
| 1868 | 416214 | 416215 | 415182 | 415184 | 13233 | 13235 | YES | O06296 | — |
| 1869 | 425351 | 425353 | 424320 | 424321 | 13233 | 13235 | YES | O06303 | — |
| 1870 | 425821 | 425824 | 424789 | 424790 | 13233 | 13235 | YES | O06304 | — |
| 1871 | 428391 | 428392 | 427357 | 427373 | 13233 | 13235 | YES | O06304 | — |
| 1872 | 482549 | 482550 | 481528 | 481530 | 13233 | 13235 | YES | P95211 | membrane |
| 1873 | 488117 | 488119 | 487097 | 487098 | 13233 | 13235 | YES | O86335 | enzyme activity |
| 1874 | 570941 | 570942 | 569920 | 569961 | 13233 | 13235 | YES | Q11146 | molecular_function |
| | | | | | | | | | unknown |
| 1875 | 578459 | 578500 | 577494 | 577495 | 13233 | 13235 | YES | Null | — |
| 1876 | 581835 | 581956 | 580812 | 580813 | 13233 | 13235 | YES | Q11156 | two-component |
| | | | | | | | | | response regulator |
| | | | | | | | | | activity |
| 1877 | 612063 | 612064 | 610910 | 610912 | 13233 | 13235 | YES | Null | — |
| 1878 | 624447 | 624522 | 623295 | 623296 | 13233 | 13235 | YES | O06398 | — |
| 1879 | 624655 | 624665 | 623419 | 623420 | 13233 | 13235 | YES | O06398 | — |
| 1880 | 625594 | 625596 | 624349 | 624350 | 13233 | 13235 | YES | O06398 | — |
| 1881 | 641609 | 641610 | 640363 | 640365 | 13233 | 13235 | YES | O06415 | — |
| 1882 | 664431 | 664432 | 663186 | 663188 | 13233 | 13235 | YES | O53767 | ribonucleoside- |
| | | | | | | | | | diphosphate |
| | | | | | | | | | reductase activity |
| 1883 | 669950 | 669952 | 668706 | 668707 | 13233 | 13235 | YES | O53772 | monooxygenase |
| | | | | | | | | | activity |
| 1884 | 690039 | 690041 | 688794 | 688795 | 13233 | 13235 | YES | O07788 | pathogenesis |
| 1885 | 693138 | 693140 | 691892 | 691893 | 13233 | 13235 | YES | O07786 | pathogenesis |
| 1886 | 713437 | 713439 | 712190 | 712191 | 13233 | 13235 | YES | O07759, O07758 | — |
| 1887 | 723680 | 723681 | 722432 | 722434 | 13233 | 13235 | YES | P96920 | DNA binding |
| | | | | | | | | | activity |
| 1888 | 731330 | 731331 | 730083 | 730093 | 13233 | 13235 | YES | P96923 | — |
| 1889 | 743870 | 744394 | 742632 | 742633 | 13233 | 13235 | YES | Null | — |
| 1890 | 800911 | 800912 | 799140 | 799142 | 13233 | 13235 | YES | P95044 | — |
| 1891 | 804268 | 804309 | 802498 | 802499 | 13233 | 13235 | YES | Null | — |
| 1892 | 832699 | 832702 | 830875 | 830876 | 13233 | 13235 | YES | O53802 | — |
| 1893 | 838696 | 838697 | 836870 | 836919 | 13233 | 13235 | YES | O53809 | — |
| 1894 | 839071 | 839072 | 837293 | 837342 | 13233 | 13235 | YES | O53809 | — |
| 1895 | 839638 | 839767 | 837908 | 837909 | 13233 | 13235 | YES | O53809 | — |
| 1896 | 841026 | 841185 | 839098 | 839099 | 13233 | 13235 | YES | O53810 | — |
| 1897 | 841398 | 841494 | 839302 | 839303 | 13233 | 13235 | YES | O53810 | — |
| 1898 | 841688 | 841689 | 839487 | 839497 | 13233 | 13235 | YES | O53810 | — |
| 1899 | 856450 | 856451 | 854258 | 854260 | 13233 | 13235 | YES | Null | — |
| 1900 | 877025 | 877028 | 874834 | 874835 | 13233 | 13235 | YES | P71834, P71835 | — |
| 1901 | 881931 | 881932 | 879738 | 879740 | 13233 | 13235 | YES | P71838 | integral to |
| | | | | | | | | | membrane |
| 1902 | 890037 | 890038 | 887845 | 887847 | 13233 | 13235 | YES | O07268 | cytoplasm |
| 1903 | 927816 | 927891 | 926984 | 926985 | 13233 | 13235 | YES | O53844 | — |
| 1904 | 928822 | 928823 | 927918 | 927928 | 13233 | 13235 | YES | O53845 | calcium ion binding |
| | | | | | | | | | activity |
| 1905 | 928975 | 928976 | 928080 | 928215 | 13233 | 13235 | YES | O53845 | calcium ion binding |
| | | | | | | | | | activity |
| 1906 | 936197 | 936204 | 935446 | 935447 | 13233 | 13235 | YES | O53850 | cell wall |
| 1907 | 953566 | 953567 | 952809 | 952811 | 13233 | 13235 | YES | Null | — |
| 1908 | 961024 | 961025 | 960268 | 960309 | 13233 | 13235 | YES | Null | — |
| 1909 | 963656 | 963657 | 962953 | 962955 | 13233 | 13235 | YES | O53876 | Mo-molybdopterin |
| | | | | | | | | | cofactor |
| | | | | | | | | | biosynthesis |
| 1910 | 965541 | 965542 | 964839 | 965070 | 13233 | 13235 | YES | O53879 | — |
| 1911 | 968900 | 968910 | 968438 | 968439 | 13233 | 13235 | YES | O53884 | — |
| 1912 | 969448 | 969449 | 968977 | 968981 | 13233 | 13235 | YES | O53884 | — |
| 1913 | 977362 | 977363 | 976894 | 976896 | 13233 | 13235 | YES | Q10540 | integral to |
| | | | | | | | | | membrane |
| 1914 | 1010671 | 1010673 | 1010204 | 1010205 | 13233 | 13235 | YES | O05900 | — |
| 1915 | 1032449 | 1032450 | 1031981 | 1031983 | 13233 | 13235 | YES | O05917 | — |
| 1916 | 1039551 | 1039553 | 1039084 | 1039085 | 13233 | 13235 | YES | O05871 | protein kinase |
| | | | | | | | | | activity |
| 1917 | 1041920 | 1041922 | 1041452 | 1041453 | 13233 | 13235 | YES | P95302 | nucleotide binding |
| | | | | | | | | | activity |
| 1918 | 1064550 | 1064551 | 1064081 | 1064110 | 13233 | 13235 | YES | Null | — |
| 1919 | 1087886 | 1087887 | 1087445 | 1087447 | 13233 | 13235 | YES | O86319 | acyl-CoA |
| | | | | | | | | | dehydrogenase |
| | | | | | | | | | activity |
| 1920 | 1090629 | 1090631 | 1090189 | 1090190 | 13233 | 13235 | YES | Null | — |
| 1921 | 1131681 | 1131683 | 1131228 | 1131229 | 13233 | 13235 | YES | O05597 | — |
| 1922 | 1135355 | 1135356 | 1134901 | 1134907 | 13233 | 13235 | YES | P96384 | membrane |
| 1923 | 1165969 | 1165971 | 1165520 | 1165521 | 13233 | 13235 | YES | Null | — |
| 1924 | 1169165 | 1169167 | 1168715 | 1168716 | 13233 | 13235 | YES | O86321 | — |
| 1925 | 1173288 | 1173289 | 1172837 | 1172839 | 13233 | 13235 | YES | Null | — |
| 1926 | 1189124 | 1189125 | 1188674 | 1188678 | 13233 | 13235 | YES | O53415 | — |
| 1927 | 1189603 | 1189622 | 1189156 | 1189157 | 13233 | 13235 | YES | O53415 | — |
| 1928 | 1189661 | 1189662 | 1189196 | 1189200 | 13233 | 13235 | YES | O53415 | — |
| 1929 | 1191462 | 1191463 | 1191000 | 1191010 | 13233 | 13235 | YES | O53416 | — |
| 1930 | 1191817 | 1192525 | 1191364 | 1191365 | 13233 | 13235 | YES | O53416 | — |
| 1931 | 1192629 | 1192812 | 1191459 | 1191460 | 13233 | 13235 | YES | O53416 | — |
| 1932 | 1214392 | 1214393 | 1213030 | 1213049 | 13233 | 13235 | YES | O53435 | — |
| 1933 | 1214589 | 1214590 | 1213245 | 1213255 | 13233 | 13235 | YES | O53435 | — |
| 1934 | 1214840 | 1214844 | 1213505 | 1213506 | 13233 | 13235 | YES | O53435 | — |
| 1935 | 1215028 | 1215074 | 1213690 | 1213691 | 13233 | 13235 | YES | O53435 | — |
| 1936 | 1219617 | 1219618 | 1218234 | 1218244 | 13233 | 13235 | YES | O53439 | — |
| 1937 | 1231791 | 1231792 | 1230417 | 1230419 | 13233 | 13235 | YES | O53449 | integral to |
| | | | | | | | | | membrane |
| 1938 | 1274621 | 1274623 | 1273248 | 1273249 | 13233 | 13235 | YES | O06545 | membrane |
| 1939 | 1300681 | 1300683 | 1299307 | 1299308 | 13233 | 13235 | YES | O50424 | — |
| 1940 | 1306903 | 1306904 | 1305528 | 1305643 | 13233 | 13235 | YES | Null | — |
| 1941 | 1314587 | 1314589 | 1313336 | 1313337 | 13233 | 13235 | YES | Null | — |
| 1942 | 1341420 | 1341421 | 1340168 | 1340182 | 13233 | 13235 | YES | O05298 | — |
| 1943 | 1358664 | 1358665 | 1357415 | 1357421 | 13233 | 13235 | YES | O05315 | — |
| 1944 | 1367083 | 1367086 | 1365839 | 1365840 | 13233 | 13235 | YES | O06291 | serine-type |
| | | | | | | | | | endopeptidase |
| | | | | | | | | | activity |
| 1945 | 1404177 | 1404178 | 1402931 | 1405929 | 13233 | 13235 | YES | Q11063, Q11061 | — |
| 1946 | 1407255 | 1407256 | 1409016 | 1409018 | 13233 | 13235 | YES | Q11058 | monooxygenase |
| | | | | | | | | | activity |
| 1947 | 1439690 | 1439691 | 1441542 | 1441686 | 13233 | 13235 | YES | Q10614 | enzyme activity |
| 1948 | 1441478 | 1441519 | 1443483 | 1443484 | 13233 | 13235 | YES | Q10616 | integral to |
| | | | | | | | | | membrane |
| 1949 | 1466163 | 1466164 | 1468112 | 1468115 | 13233 | 13235 | YES | Q10620 | integral to |
| | | | | | | | | | membrane |
| 1950 | 1475063 | 1475064 | 1477025 | 1477027 | 13233 | 13235 | YES | Null | — |
| 1951 | 1539986 | 1539987 | 1541949 | 1543298 | 13233 | 13235 | YES | Null | — |
| 1952 | 1540483 | 1540485 | 1543804 | 1543805 | 13233 | 13235 | YES | P71799 | — |
| 1953 | 1543150 | 1543152 | 1546470 | 1546471 | 13233 | 13235 | YES | P71801 | sulfotransferase |
| | | | | | | | | | activity |
| 1954 | 1569167 | 1569168 | 1572486 | 1572849 | 13233 | 13235 | YES | P71664 | integral to |
| | | | | | | | | | membrane |
| 1955 | 1608954 | 1608976 | 1612645 | 1612646 | 13233 | 13235 | YES | O06823 | — |
| 1956 | 1627336 | 1627337 | 1630987 | 1631015 | 13233 | 13235 | YES | O06810 | — |
| 1957 | 1628863 | 1628891 | 1632541 | 1632542 | 13233 | 13235 | YES | O06810 | — |
| 1958 | 1632753 | 1632882 | 1636167 | 1636168 | 13233 | 13235 | YES | O06808 | — |
| 1959 | 1632905 | 1632909 | 1636181 | 1636182 | 13233 | 13235 | YES | O06808 | — |
| 1960 | 1633457 | 1633467 | 1636730 | 1636731 | 13233 | 13235 | YES | O06808 | — |
| 1961 | 1689986 | 1689987 | 1693238 | 1693240 | 13233 | 13235 | YES | P71783 | — |
| 1962 | 1737536 | 1737538 | 1753521 | 1753522 | 13233 | 13235 | YES | Q10777 | enzyme activity |
| 1963 | 1738035 | 1738037 | 1754019 | 1754020 | 13233 | 13235 | YES | Q10777, Q10776 | — |
| 1964 | 1744186 | 1744191 | 1760169 | 1760170 | 13233 | 13235 | YES | Q10761 | succinate |
| | | | | | | | | | dehydrogenase |
| | | | | | | | | | activity |
| 1965 | 1745810 | 1747954 | 1761789 | 1761790 | 13233 | 13235 | YES | Q10773 | membrane |
| 1966 | 1754245 | 1754246 | 1768071 | 1768868 | 13233 | 13235 | YES | Q10768 | alpha-amylase |
| | | | | | | | | | activity |
| 1967 | 1765829 | 1765830 | 1780461 | 1780463 | 13233 | 13235 | YES | O06615 | — |
| 1968 | 1765952 | 1765954 | 1780585 | 1780586 | 13233 | 13235 | YES | O06615 | — |
| 1969 | 1837548 | 1837549 | 1852180 | 1852182 | 13233 | 13235 | YES | Null | — |
| 1970 | 1850305 | 1850327 | 1864938 | 1864939 | 13233 | 13235 | YES | P94986 | — |
| 1971 | 1879687 | 1879698 | 1894299 | 1894300 | 13233 | 13235 | YES | O53916 | nucleotide binding |
| | | | | | | | | | activity |
| 1972 | 1892915 | 1892916 | 1907517 | 1907558 | 13233 | 13235 | YES | Null | — |
| 1973 | 1900884 | 1900887 | 1915542 | 1915543 | 13233 | 13235 | YES | O33192 | — |
| 1974 | 1914068 | 1914069 | 1928724 | 1928726 | 13233 | 13235 | YES | Null | — |
| 1975 | 1930724 | 1930725 | 1945381 | 1945383 | 13233 | 13235 | YES | P71976 | — |
| 1976 | 1941012 | 1941053 | 1955670 | 1955671 | 13233 | 13235 | YES | Null | — |
| 1977 | 1953648 | 1953650 | 1968249 | 1968250 | 13233 | 13235 | YES | O33271 | — |
| 1978 | 1967611 | 1967752 | 1982211 | 1982212 | 13233 | 13235 | YES | O65937 | — |
| 1979 | 1968448 | 1968449 | 1982898 | 1982967 | 13233 | 13235 | YES | O65937 | — |
| 1980 | 1968664 | 1968665 | 1983192 | 1983261 | 13233 | 13235 | YES | O65937 | — |
| 1981 | 1983171 | 1983172 | 1992328 | 1992330 | 13233 | 13235 | YES | O06794 | — |
| 1982 | 1985312 | 1985313 | 1994470 | 1994472 | 13233 | 13235 | YES | O06795 | molecular_function |
| | | | | | | | | | unknown |
| 1983 | 1992126 | 1992145 | 2001684 | 2001685 | 13233 | 13235 | YES | O06801 | — |
| 1984 | 2016682 | 2016683 | 2026222 | 2026231 | 13233 | 13235 | YES | O86373 | — |
| 1985 | 2051905 | 2051915 | 2061448 | 2061449 | 13233 | 13235 | YES | Q50615 | integral to |
| | | | | | | | | | membrane |
| 1986 | 2064977 | 2064978 | 2074511 | 2074614 | 13233 | 13235 | YES | Null | — |
| 1987 | 2079195 | 2079196 | 2088841 | 2088979 | 13233 | 13235 | YES | Q50594 | integral to |
| | | | | | | | | | membrane |
| 1988 | 2080613 | 2080626 | 2090406 | 2090407 | 13233 | 13235 | YES | Q50593 | integral to |
| | | | | | | | | | membrane |
| 1989 | 2084192 | 2084193 | 2093973 | 2093975 | 13233 | 13235 | YES | P95165 | phosphogluconate |
| | | | | | | | | | dehydrogenase |
| | | | | | | | | | (decarboxylating) |
| | | | | | | | | | activity |
| 1990 | 2085136 | 2085137 | 2094918 | 2094925 | 13233 | 13235 | YES | P95165 | phosphogluconate |
| | | | | | | | | | dehydrogenase |
| | | | | | | | | | (decarboxylating) |
| | | | | | | | | | activity |
| 1991 | 2087040 | 2087041 | 2096828 | 2096830 | 13233 | 13235 | YES | Null | — |
| 1992 | 2093386 | 2093387 | 2103175 | 2103177 | 13233 | 13235 | YES | Null | — |
| 1993 | 2099733 | 2099735 | 2109523 | 2109524 | 13233 | 13235 | YES | Null | — |
| 1994 | 2116913 | 2116915 | 2126702 | 2126703 | 13233 | 13235 | YES | O07753 | transporter activity |
| 1995 | 2123684 | 2123700 | 2133472 | 2133473 | 13233 | 13235 | YES | O07748 | — |
| 1996 | 2127747 | 2127758 | 2137520 | 2137521 | 13233 | 13235 | YES | O07744 | — |
| 1997 | 2133043 | 2133044 | 2142806 | 2142808 | 13233 | 13235 | YES | O07737 | alcohol |
| | | | | | | | | | dehydrogenase |
| | | | | | | | | | activity |
| 1998 | 2133758 | 2133760 | 2143522 | 2143523 | 13233 | 13235 | YES | O07737 | alcohol |
| | | | | | | | | | dehydrogenase |
| | | | | | | | | | activity |
| 1999 | 2136332 | 2136378 | 2146095 | 2146096 | 13233 | 13235 | YES | O07733 | — |
| 2000 | 2151627 | 2151629 | 2161345 | 2161346 | 13233 | 13235 | YES | O07718 | enzyme activity |
| 2001 | 2153548 | 2153549 | 2163265 | 2163278 | 13233 | 13235 | YES | O07716 | enzyme activity |
| 2002 | 2153668 | 2154142 | 2163397 | 2163398 | 13233 | 13235 | YES | O07716 | enzyme activity |
| 2003 | 2154541 | 2154542 | 2163787 | 2163847 | 13233 | 13235 | YES | O07716 | enzyme activity |
| 2004 | 2156236 | 2156602 | 2165551 | 2165552 | 13233 | 13235 | YES | O07716 | enzyme activity |
| 2005 | 2160449 | 2160451 | 2168813 | 2168814 | 13233 | 13235 | YES | O53960 | — |
| 2006 | 2184230 | 2184231 | 2192593 | 2192595 | 13233 | 13235 | YES | P95275 | electron transport |
| 2007 | 2199225 | 2199227 | 2207589 | 2207590 | 13233 | 13235 | YES | Null | — |
| 2008 | 2254439 | 2254440 | 2270521 | 2270531 | 13233 | 13235 | YES | Null | — |
| 2009 | 2260638 | 2260639 | 2276722 | 2276724 | 13233 | 13235 | YES | O53475 | nucleoside |
| | | | | | | | | | metabolism |
| 2010 | 2312077 | 2312079 | 2328162 | 2328163 | 13233 | 13235 | YES | Q10680 | vitamin B12 |
| | | | | | | | | | biosynthesis |
| 2011 | 2313772 | 2313774 | 2329856 | 2329857 | 13233 | 13235 | YES | Q10671 | porphyrin |
| | | | | | | | | | biosynthesis |
| 2012 | 2313988 | 2313989 | 2330071 | 2332091 | 13233 | 13235 | YES | Q10671, Q10683 | — |
| 2013 | 2320088 | 2320092 | 2338200 | 2338201 | 13233 | 13235 | YES | Q10689 | integral to |
| | | | | | | | | | membrane |
| 2014 | 2324539 | 2324551 | 2342648 | 2342649 | 13233 | 13235 | YES | Q10692 | — |
| 2015 | 2329456 | 2329457 | 2347554 | 2347595 | 13233 | 13235 | YES | Q10699 | DNA binding |
| | | | | | | | | | activity |
| 2016 | 2339127 | 2339128 | 2357282 | 2357286 | 13233 | 13235 | YES | Q10707 | — |
| 2017 | 2339871 | 2339873 | 2358029 | 2358030 | 13233 | 13235 | YES | Q10707, Q9ZAE2 | — |
| 2018 | 2347255 | 2347256 | 2365412 | 2366761 | 13233 | 13235 | YES | Null | — |
| 2019 | 2349048 | 2349049 | 2368563 | 2368565 | 13233 | 13235 | YES | Null | — |
| 2020 | 2352985 | 2352986 | 2372501 | 2372542 | 13233 | 13235 | YES | O33247 | molecular_function |
| | | | | | | | | | unknown |
| 2021 | 2361585 | 2361586 | 2381158 | 2381186 | 13233 | 13235 | YES | O33258 | — |
| 2022 | 2378768 | 2378769 | 2398368 | 2398377 | 13233 | 13235 | YES | O06237 | — |
| 2023 | 2382325 | 2382432 | 2401925 | 2401926 | 13233 | 13235 | YES | Null | — |
| 2024 | 2402489 | 2402494 | 2421973 | 2421974 | 13233 | 13235 | YES | O06217 | — |
| 2025 | 2404055 | 2404056 | 2423535 | 2423634 | 13233 | 13235 | YES | O06215 | — |
| 2026 | 2404228 | 2404229 | 2423816 | 2423835 | 13233 | 13235 | YES | O06215 | — |
| 2027 | 2410508 | 2410509 | 2430114 | 2431463 | 13233 | 13235 | YES | Null | — |
| 2028 | 2427464 | 2427465 | 2448428 | 2448430 | 13233 | 13235 | YES | O53521 | enzyme activity |
| 2029 | 2440537 | 2440642 | 2461502 | 2461503 | 13233 | 13235 | YES | Q10389 | integral to |
| | | | | | | | | | membrane |
| 2030 | 2480295 | 2480297 | 2501146 | 2501147 | 13233 | 13235 | YES | Q10511 | — |
| 2031 | 2502267 | 2502271 | 2523205 | 2523206 | 13233 | 13235 | YES | Null | — |
| 2032 | 2504789 | 2504790 | 2525724 | 2525726 | 13233 | 13235 | YES | O53525 | electron transport |
| 2033 | 2511025 | 2511026 | 2531961 | 2532058 | 13233 | 13235 | YES | Null | — |
| 2034 | 2513519 | 2513520 | 2534561 | 2534564 | 13233 | 13235 | YES | O53536 | nitrogen |
| | | | | | | | | | metabolism |
| 2035 | 2528967 | 2528968 | 2550011 | 2551360 | 13233 | 13235 | YES | Q50687 | glycerol |
| | | | | | | | | | metabolism |
| 2036 | 2540310 | 2540311 | 2562712 | 2562714 | 13233 | 13235 | YES | Q50675 | membrane |
| 2037 | 2540853 | 2540854 | 2563256 | 2563259 | 13233 | 13235 | YES | Q59570 | thiosulfate |
| | | | | | | | | | sulfurtransferase |
| | | | | | | | | | activity |
| 2038 | 2541962 | 2541964 | 2564367 | 2564368 | 13233 | 13235 | YES | Q50673 | enzyme activity |
| 2039 | 2544362 | 2544364 | 2566766 | 2566767 | 13233 | 13235 | YES | Null | — |
| 2040 | 2584392 | 2584410 | 2606795 | 2606796 | 13233 | 13235 | YES | P71879 | transporter activity |
| 2041 | 2592156 | 2592158 | 2614558 | 2614559 | 13233 | 13235 | YES | Null | — |
| 2042 | 2607119 | 2607120 | 2639043 | 2639047 | 13233 | 13235 | YES | P95249 | — |
| 2043 | 2658273 | 2658275 | 2690200 | 2690201 | 13233 | 13235 | YES | P71749 | — |
| 2044 | 2661152 | 2661153 | 2693078 | 2693088 | 13233 | 13235 | YES | P71748 | oxygen transporter |
| | | | | | | | | | activity |
| 2045 | 2672954 | 2672976 | 2704883 | 2704884 | 13233 | 13235 | YES | P71736 | — |
| 2046 | 2673694 | 2673779 | 2705602 | 2705603 | 13233 | 13235 | YES | Null | — |
| 2047 | 2679611 | 2679613 | 2711425 | 2711426 | 13233 | 13235 | YES | P71729 | — |
| 2048 | 2689758 | 2689759 | 2721571 | 2721574 | 13233 | 13235 | YES | P71924 | DNA binding |
| | | | | | | | | | activity |
| 2049 | 2692384 | 2692385 | 2724199 | 2724220 | 13233 | 13235 | YES | Null | — |
| 2050 | 2748934 | 2748935 | 2780769 | 2780773 | 13233 | 13235 | YES | O53203 | — |
| 2051 | 2752776 | 2752777 | 2784614 | 2785963 | 13233 | 13235 | YES | Null | — |
| 2052 | 2762072 | 2762073 | 2795268 | 2795270 | 13233 | 13235 | YES | Null | — |
| 2053 | 2762938 | 2762939 | 2796135 | 2796137 | 13233 | 13235 | YES | O53212 | — |
| 2054 | 2763778 | 2763780 | 2796976 | 2796977 | 13233 | 13235 | YES | O53212 | — |
| 2055 | 2768766 | 2768767 | 2801963 | 2801967 | 13233 | 13235 | YES | O53215 | RNA-3′-phosphate |
| | | | | | | | | | cyclase activity |
| 2056 | 2769956 | 2769957 | 2803156 | 2803166 | 13233 | 13235 | YES | O53215 | RNA-3′-phosphate |
| | | | | | | | | | cyclase activity |
| 2057 | 2771738 | 2771747 | 2804947 | 2804948 | 13233 | 13235 | YES | O53215 | RNA-3′-phosphate |
| | | | | | | | | | cyclase activity |
| 2058 | 2834003 | 2834650 | 2867204 | 2867205 | 13233 | 13235 | YES | P95009 | — |
| 2059 | 2839452 | 2839453 | 2871997 | 2871999 | 13233 | 13235 | YES | P95001 | shikimate 5- |
| | | | | | | | | | dehydrogenase |
| | | | | | | | | | activity |
| 2060 | 2849054 | 2849055 | 2881600 | 2881602 | 13233 | 13235 | YES | Q50737 | — |
| 2061 | 2855417 | 2855418 | 2887964 | 2887967 | 13233 | 13235 | YES | Q50732 | — |
| 2062 | 2863468 | 2863469 | 2896017 | 2896019 | 13233 | 13235 | YES | Q50649 | nucleic acid binding |
| | | | | | | | | | activity |
| 2063 | 2890583 | 2890593 | 2923133 | 2923134 | 13233 | 13235 | YES | Q50630 | — |
| 2064 | 2911188 | 2911198 | 2943729 | 2943730 | 13233 | 13235 | YES | O06199 | — |
| 2065 | 2915441 | 2915442 | 2947973 | 2947977 | 13233 | 13235 | YES | O06191 | — |
| 2066 | 2925032 | 2925033 | 2957567 | 2957569 | 13233 | 13235 | YES | P71930 | molecular_function |
| | | | | | | | | | unknown |
| 2067 | 2925801 | 2925803 | 2958337 | 2958338 | 13233 | 13235 | YES | P71930 | molecular_function |
| | | | | | | | | | unknown |
| 2068 | 2938901 | 2938902 | 2982418 | 2982420 | 13233 | 13235 | YES | Null | — |
| 2069 | 2947177 | 2947218 | 2990695 | 2990696 | 13233 | 13235 | YES | Null | — |
| 2070 | 2952702 | 2952795 | 2996165 | 2996166 | 13233 | 13235 | YES | O86317 | — |
| 2071 | 3010580 | 3010581 | 3053941 | 3053943 | 13233 | 13235 | YES | O33284 | — |
| 2072 | 3011358 | 3011359 | 3054720 | 3054795 | 13233 | 13235 | YES | O33284 | — |
| 2073 | 3012343 | 3012367 | 3055789 | 3055790 | 13233 | 13235 | YES | O33285 | — |
| 2074 | 3042938 | 3042939 | 3086361 | 3086386 | 13233 | 13235 | YES | O33321 | DNA binding |
| | | | | | | | | | activity |
| 2075 | 3043634 | 3043635 | 3087081 | 3087083 | 13233 | 13235 | YES | P30234 | alanine |
| | | | | | | | | | dehydrogenase |
| | | | | | | | | | activity |
| 2076 | 3064422 | 3064426 | 3107870 | 3107871 | 13233 | 13235 | YES | P71652 | — |
| 2077 | 3073960 | 3073961 | 3117405 | 3117408 | 13233 | 13235 | YES | P71639 | DNA binding |
| | | | | | | | | | activity |
| 2078 | 3075770 | 3075771 | 3119217 | 3119800 | 13233 | 13235 | YES | Null | — |
| 2079 | 3075914 | 3076356 | 3119953 | 3119954 | 13233 | 13235 | YES | Null | — |
| 2080 | 3076439 | 3076501 | 3120027 | 3120028 | 13233 | 13235 | YES | Null | — |
| 2081 | 3078601 | 3078745 | 3122118 | 3122119 | 13233 | 13235 | YES | Null | — |
| 2082 | 3078967 | 3078968 | 3122331 | 3122394 | 13233 | 13235 | YES | Null | — |
| 2083 | 3088034 | 3088044 | 3131469 | 3131470 | 13233 | 13235 | YES | P71629 | molecular_function |
| | | | | | | | | | unknown |
| 2084 | 3098539 | 3098540 | 3141965 | 3141967 | 13233 | 13235 | YES | P71617 | transporter activity |
| 2085 | 3112605 | 3112606 | 3156032 | 3156073 | 13233 | 13235 | YES | Null | — |
| 2086 | 3146666 | 3146667 | 3190147 | 3190149 | 13233 | 13235 | YES | Q10806, Q10806 | — |
| 2087 | 3150757 | 3150759 | 3194239 | 3194240 | 13233 | 13235 | YES | Q10809 | — |
| 2088 | 3196190 | 3196191 | 3239559 | 3239600 | 13233 | 13235 | YES | Null | — |
| 2089 | 3248018 | 3248123 | 3291442 | 3291443 | 13233 | 13235 | YES | Null | — |
| 2090 | 3253069 | 3253071 | 3296379 | 3296380 | 13233 | 13235 | YES | P96284 | enzyme activity |
| 2091 | 3267820 | 3267822 | 3311129 | 3311130 | 13233 | 13235 | YES | P95134 | metabolism |
| 2092 | 3288055 | 3288056 | 3331363 | 3331366 | 13233 | 13235 | YES | P95120 | aspartic-type |
| | | | | | | | | | endopeptidase |
| | | | | | | | | | activity |
| 2093 | 3293332 | 3293333 | 3336642 | 3336751 | 13233 | 13235 | YES | Null | — |
| 2094 | 3294465 | 3294466 | 3337893 | 3337903 | 13233 | 13235 | YES | P95114 | cell wall |
| 2095 | 3307774 | 3307815 | 3351211 | 3351212 | 13233 | 13235 | YES | Null | — |
| 2096 | 3313357 | 3313358 | 3356738 | 3356740 | 13233 | 13235 | YES | Null | — |
| 2097 | 3336999 | 3337085 | 3380437 | 3380438 | 13233 | 13235 | YES | O53268, O53268 | — |
| 2098 | 3371757 | 3371758 | 3415194 | 3415209 | 13233 | 13235 | YES | Null | — |
| 2099 | 3381643 | 3381645 | 3425094 | 3425095 | 13233 | 13235 | YES | P95097 | acyl-CoA |
| | | | | | | | | | dehydrogenase |
| | | | | | | | | | activity |
| 2100 | 3430544 | 3430546 | 3473994 | 3473995 | 13233 | 13235 | YES | Null | — |
| 2101 | 3436512 | 3436513 | 3479961 | 3479963 | 13233 | 13235 | YES | Null | — |
| 2102 | 3441287 | 3441288 | 3484737 | 3487503 | 13233 | 13235 | YES | O05793, O08362 | — |
| 2103 | 3455437 | 3456765 | 3501662 | 3501663 | 13233 | 13235 | YES | P95191 | receptor activity |
| 2104 | 3484092 | 3484093 | 3528980 | 3528984 | 13233 | 13235 | YES | O53309 | — |
| 2105 | 3484287 | 3486424 | 3529178 | 3529179 | 13233 | 13235 | YES | Null | — |
| 2106 | 3488662 | 3488663 | 3531407 | 3531409 | 13233 | 13235 | YES | O53312 | — |
| 2107 | 3501951 | 3501952 | 3544697 | 3544699 | 13233 | 13235 | YES | O53326 | — |
| 2108 | 3508479 | 3508480 | 3551226 | 3552575 | 13233 | 13235 | YES | Null | — |
| 2109 | 3508604 | 3508605 | 3552709 | 3554058 | 13233 | 13235 | YES | Null | — |
| 2110 | 3513313 | 3513315 | 3558776 | 3558777 | 13233 | 13235 | YES | Null | — |
| 2111 | 3521477 | 3521488 | 3566939 | 3566940 | 13233 | 13235 | YES | Null | — |
| 2112 | 3535183 | 3535184 | 3580635 | 3580637 | 13233 | 13235 | YES | O05863 | enzyme activity |
| 2113 | 3537673 | 3537674 | 3583126 | 3583130 | 13233 | 13235 | YES | O05860 | enzyme activity |
| 2114 | 3545179 | 3545181 | 3590635 | 3590636 | 13233 | 13235 | YES | Null | — |
| 2115 | 3545228 | 3545230 | 3590683 | 3590684 | 13233 | 13235 | YES | Null | — |
| 2116 | 3549001 | 3549042 | 3594455 | 3594456 | 13233 | 13235 | YES | Null | — |
| 2117 | 3552793 | 3552795 | 3598191 | 3598192 | 13233 | 13235 | YES | Null | — |
| 2118 | 3564990 | 3564992 | 3610387 | 3610388 | 13233 | 13235 | YES | O05879 | molecular_function |
| | | | | | | | | | unknown |
| 2119 | 3600628 | 3600629 | 3646024 | 3646037 | 13233 | 13235 | YES | P96870 | transferase activity |
| 2120 | 3618520 | 3618521 | 3663928 | 3663982 | 13233 | 13235 | YES | P96886 | — |
| 2121 | 3662150 | 3662151 | 3707621 | 3707625 | 13233 | 13235 | YES | Null | — |
| 2122 | 3681154 | 3681156 | 3723901 | 3723902 | 13233 | 13235 | YES | O53388 | — |
| 2123 | 3692113 | 3692114 | 3738414 | 3738416 | 13233 | 13235 | YES | O53394, O53395 | — |
| 2124 | 3692228 | 3692247 | 3738530 | 3738531 | 13233 | 13235 | YES | O53395 | — |
| 2125 | 3692363 | 3692364 | 3738647 | 3738758 | 13233 | 13235 | YES | O53395 | — |
| 2126 | 3694087 | 3694165 | 3740704 | 3740705 | 13233 | 13235 | YES | O53395 | — |
| 2127 | 3694390 | 3694391 | 3740920 | 3740930 | 13233 | 13235 | YES | O53395 | — |
| 2128 | 3694743 | 3694812 | 3741282 | 3741283 | 13233 | 13235 | YES | O53395 | — |
| 2129 | 3695504 | 3695505 | 3741965 | 3741967 | 13233 | 13235 | YES | O53395 | — |
| 2130 | 3700589 | 3700590 | 3747051 | 3747053 | 13233 | 13235 | YES | O50378 | — |
| 2131 | 3706947 | 3706948 | 3753410 | 3753680 | 13233 | 13235 | YES | Null | — |
| 2132 | 3708737 | 3708738 | 3755201 | 3755207 | 13233 | 13235 | YES | Null | — |
| 2133 | 3713227 | 3713228 | 3759696 | 3759698 | 13233 | 13235 | YES | O50379 | — |
| 2134 | 3733169 | 3733265 | 3779639 | 3779640 | 13233 | 13235 | YES | O50396 | — |
| 2135 | 3733306 | 3733316 | 3779671 | 3779672 | 13233 | 13235 | YES | O50396 | — |
| 2136 | 3744771 | 3744772 | 3791127 | 3791132 | 13233 | 13235 | YES | O50406 | enzyme activity |
| 2137 | 3748507 | 3748510 | 3794864 | 3794865 | 13233 | 13235 | YES | Null | — |
| 2138 | 3748698 | 3748699 | 3795053 | 3796402 | 13233 | 13235 | YES | Null | — |
| 2139 | 3754439 | 3754440 | 3802152 | 3802218 | 13233 | 13235 | YES | O50415 | — |
| 2140 | 3754539 | 3754580 | 3802327 | 3802328 | 13233 | 13235 | YES | O50415 | — |
| 2141 | 3754972 | 3754973 | 3802700 | 3802710 | 13233 | 13235 | YES | O50415 | — |
| 2142 | 3756095 | 3756164 | 3803832 | 3803833 | 13233 | 13235 | YES | O50415 | — |
| 2143 | 3772838 | 3773120 | 3820497 | 3820498 | 13233 | 13235 | YES | Null | — |
| 2144 | 3795208 | 3795209 | 3842576 | 3847493 | 13233 | 13235 | YES | Q50703, O06246 | — |
| 2145 | 3810175 | 3810176 | 3862469 | 3862471 | 13233 | 13235 | YES | Null | — |
| 2146 | 3822425 | 3822426 | 3874720 | 3874722 | 13233 | 13235 | YES | O06320 | — |
| 2147 | 3826298 | 3826299 | 3878594 | 3878598 | 13233 | 13235 | YES | Null | — |
| 2148 | 3826332 | 3826333 | 3878631 | 3878633 | 13233 | 13235 | YES | Null | — |
| 2149 | 3843412 | 3843413 | 3897070 | 3897774 | 13233 | 13235 | YES | O06342 | enzyme activity |
| 2150 | 3845388 | 3845389 | 3899759 | 3899762 | 13233 | 13235 | YES | O06343 | molecular_function |
| | | | | | | | | | unknown |
| 2151 | 3873325 | 3873326 | 3927698 | 3927779 | 13233 | 13235 | YES | O53552 | — |
| 2152 | 3873813 | 3873814 | 3928276 | 3928317 | 13233 | 13235 | YES | O53552 | — |
| 2153 | 3874278 | 3874297 | 3928795 | 3928796 | 13233 | 13235 | YES | O53552 | — |
| 2154 | 3874602 | 3874665 | 3929101 | 3929102 | 13233 | 13235 | YES | O53552 | — |
| 2155 | 3874830 | 3874831 | 3929257 | 3929276 | 13233 | 13235 | YES | O53552 | — |
| 2156 | 3877295 | 3877305 | 3931731 | 3931732 | 13233 | 13235 | YES | O53553 | — |
| 2157 | 3877742 | 3877743 | 3932169 | 3932328 | 13233 | 13235 | YES | O53553 | — |
| 2158 | 3878312 | 3878340 | 3932781 | 3932782 | 13233 | 13235 | YES | O53553 | — |
| 2159 | 3879828 | 3879829 | 3934873 | 3934922 | 13233 | 13235 | YES | O53553 | — |
| 2160 | 3888742 | 3888752 | 3944049 | 3944050 | 13233 | 13235 | YES | O53557 | hydroxymethylglutaryl- |
| | | | | | | | | | CoA reductase |
| | | | | | | | | | (NADPH) activity |
| 2161 | 3889054 | 3889064 | 3944352 | 3944353 | 13233 | 13235 | YES | O53557 | hydroxymethylglutaryl- |
| | | | | | | | | | CoA reductase |
| | | | | | | | | | (NADPH) activity |
| 2162 | 3892768 | 3892769 | 3947748 | 3948330 | 13233 | 13235 | YES | O53559 | — |
| 2163 | 3898149 | 3898150 | 3954929 | 3954931 | 13233 | 13235 | YES | O53563 | monooxygenase |
| | | | | | | | | | activity |
| 2164 | 3951089 | 3951090 | 4007870 | 4007872 | 13233 | 13235 | YES | P96848 | arylamine N- |
| | | | | | | | | | acetyltransferase |
| | | | | | | | | | activity |
| 2165 | 3964661 | 3964663 | 4021443 | 4021444 | 13233 | 13235 | YES | P96861 | RNA binding |
| | | | | | | | | | activity |
| 2166 | 3968799 | 3968800 | 4025580 | 4025582 | 13233 | 13235 | YES | Null | — |
| 2167 | 3980409 | 3980437 | 4037191 | 4037192 | 13233 | 13235 | YES | O06287 | — |
| 2168 | 3980524 | 3980525 | 4037279 | 4037281 | 13233 | 13235 | YES | O06287 | — |
| 2169 | 3996679 | 3996680 | 4053435 | 4053537 | 13233 | 13235 | YES | O06272, O06271 | — |
| 2170 | 3999617 | 3999619 | 4056484 | 4056485 | 13233 | 13235 | YES | Null | — |
| 2171 | 4031594 | 4031711 | 4094354 | 4094355 | 13233 | 13235 | YES | O69621 | — |
| 2172 | 4031993 | 4031994 | 4094627 | 4094644 | 13233 | 13235 | YES | Null | — |
| 2173 | 4032348 | 4032349 | 4094998 | 4095000 | 13233 | 13235 | YES | O69623 | — |
| 2174 | 4036755 | 4036757 | 4099406 | 4099407 | 13233 | 13235 | YES | Null | — |
| 2175 | 4076537 | 4076539 | 4139187 | 4139188 | 13233 | 13235 | YES | O69664 | glycerol kinase |
| | | | | | | | | | activity |
| 2176 | 4092930 | 4093092 | 4155579 | 4155580 | 13233 | 13235 | YES | P96420 | enzyme activity |
| 2177 | 4094427 | 4094428 | 4156905 | 4156946 | 13233 | 13235 | YES | Null | — |
| 2178 | 4107128 | 4107129 | 4169665 | 4169667 | 13233 | 13235 | YES | O69691 | — |
| 2179 | 4108423 | 4108425 | 4170961 | 4170962 | 13233 | 13235 | YES | O69692 | — |
| 2180 | 4133434 | 4133436 | 4197137 | 4197138 | 13233 | 13235 | YES | Null | — |
| 2181 | 4134910 | 4134911 | 4198612 | 4198614 | 13233 | 13235 | YES | Null | — |
| 2182 | 4154969 | 4154971 | 4218672 | 4218673 | 13233 | 13235 | YES | P72040 | — |
| 2183 | 4247018 | 4247020 | 4310742 | 4310743 | 13233 | 13235 | YES | P96242 | proteolysis and |
| | | | | | | | | | peptidolysis |
| 2184 | 4254698 | 4254699 | 4318421 | 4318691 | 13233 | 13235 | YES | Null | — |
| 2185 | 4274868 | 4274869 | 4338592 | 4338594 | 13233 | 13235 | YES | Null | — |
| 2186 | 4277269 | 4277306 | 4340994 | 4340995 | 13233 | 13235 | YES | P96213 | — |
| 2187 | 4277709 | 4277722 | 4341398 | 4341399 | 13233 | 13235 | YES | P96213 | — |
| 2188 | 4295484 | 4295503 | 4359161 | 4359162 | 13233 | 13235 | YES | O69743 | — |
| 2189 | 4295520 | 4295548 | 4359179 | 4359180 | 13233 | 13235 | YES | O69743 | — |
| 2190 | 4297431 | 4297432 | 4361063 | 4361065 | 13233 | 13235 | YES | Q933K8 | — |
| 2191 | 4297455 | 4297457 | 4361088 | 4361089 | 13233 | 13235 | YES | Q933K8 | — |
| 2192 | 4307387 | 4307388 | 4371019 | 4373416 | 13233 | 13235 | YES | O05457, O05455 | — |
| 2193 | 4307808 | 4307809 | 4373846 | 4373848 | 13233 | 13235 | YES | O05454 | — |
| 2194 | 4308332 | 4308333 | 4374371 | 4374373 | 13233 | 13235 | YES | Null | — |
| 2195 | 4312098 | 4312100 | 4378138 | 4378139 | 13233 | 13235 | YES | O05450 | — |
| 2196 | 4316061 | 4316062 | 4382100 | 4382102 | 13233 | 13235 | YES | O05448 | — |
| 2197 | 4317102 | 4317108 | 4383142 | 4383143 | 13233 | 13235 | YES | O07036 | — |
| 2198 | 4318998 | 4318999 | 4385033 | 4385035 | 13233 | 13235 | YES | O05446 | — |
| 2199 | 4334624 | 4334625 | 4400660 | 4400662 | 13233 | 13235 | YES | O53590 | DNA binding |
| | | | | | | | | | activity |
| 2200 | 3076218 | 3076219 | 3122987 | 3123052 | 13233 | 13235 | YES | Null | — |
| 2201 | 71576 | 71614 | 71584 | 71585 | 147805 | 147807 | NO | NULL | NULL |
| 2202 | 131213 | 131215 | 131174 | 131175 | 578886 | 578887 | NO | NULL | NULL |
| 2203 | 147853 | 147854 | 147812 | 147814 | 582109 | 582110 | NO | NULL | NULL |
| 2204 | 230770 | 230772 | 230575 | 230576 | 596768 | 596769 | NO | NULL | NULL |
| 2205 | 291957 | 291959 | 293631 | 293632 | 612279 | 612281 | NO | NULL | NULL |
| 2206 | 578459 | 578500 | 577494 | 577495 | 664896 | 664897 | NO | NULL | NULL |
| 2207 | 612063 | 612064 | 610910 | 610912 | 704228 | 704229 | NO | NULL | NULL |
| 2208 | 743870 | 744394 | 742632 | 742633 | 730004 | 730005 | NO | NULL | NULL |
| 2209 | 804268 | 804309 | 802498 | 802499 | 737681 | 737682 | NO | NULL | NULL |
| 2210 | 856450 | 856451 | 854258 | 854260 | 804527 | 804680 | NO | NULL | NULL |
| 2211 | 953566 | 953567 | 952809 | 952811 | 815060 | 815062 | NO | NULL | NULL |
| 2212 | 961024 | 961025 | 960268 | 960309 | 960120 | 960270 | NO | NULL | NULL |
| 2213 | 1064550 | 1064551 | 1064081 | 1064110 | 1090204 | 1090205 | NO | NULL | NULL |
| 2214 | 1090629 | 1090631 | 1090189 | 1090190 | 1172885 | 1172887 | NO | NULL | NULL |
| 2215 | 1165969 | 1165971 | 1165520 | 1165521 | 1277359 | 1277361 | NO | NULL | NULL |
| 2216 | 1173288 | 1173289 | 1172837 | 1172839 | 1305018 | 1305133 | NO | NULL | NULL |
| 2217 | 1306903 | 1306904 | 1305528 | 1305643 | 1312879 | 1312880 | NO | NULL | NULL |
| 2218 | 1314587 | 1314589 | 1313336 | 1313337 | 1365329 | 1365330 | NO | NULL | NULL |
| 2219 | 1475063 | 1475064 | 1477025 | 1477027 | 1408866 | 1408867 | NO | NULL | NULL |
| 2220 | 1539986 | 1539987 | 1541949 | 1543298 | 1476568 | 1476570 | NO | NULL | NULL |
| 2221 | 1837548 | 1837549 | 1852180 | 1852182 | 1489302 | 1489303 | NO | NULL | NULL |
| 2222 | 1892915 | 1892916 | 1907517 | 1907558 | 1606135 | 1606137 | NO | NULL | NULL |
| 2223 | 1914068 | 1914069 | 1928724 | 1928726 | 1630252 | 1630253 | NO | NULL | NULL |
| 2224 | 1941012 | 1941053 | 1955670 | 1955671 | 1644464 | 1644505 | NO | NULL | NULL |
| 2225 | 2064977 | 2064978 | 2074511 | 2074614 | 1843089 | 1843091 | NO | NULL | NULL |
| 2226 | 2087040 | 2087041 | 2096828 | 2096830 | 1886393 | 1886394 | NO | NULL | NULL |
| 2227 | 2093386 | 2093387 | 2103175 | 2103177 | 1898321 | 1898362 | NO | NULL | NULL |
| 2228 | 2099733 | 2099735 | 2109523 | 2109524 | 1919528 | 1919530 | NO | NULL | NULL |
| 2229 | 2199225 | 2199227 | 2207589 | 2207590 | 2094050 | 2094052 | NO | NULL | NULL |
| 2230 | 2254439 | 2254440 | 2270521 | 2270531 | 2100397 | 2100399 | NO | NULL | NULL |
| 2231 | 2347255 | 2347256 | 2365412 | 2366761 | 2132111 | 2132112 | NO | NULL | NULL |
| 2232 | 2349048 | 2349049 | 2368563 | 2368565 | 2484768 | 2484769 | NO | NULL | NULL |
| 2233 | 2382325 | 2382432 | 2401925 | 2401926 | 2484875 | 2484876 | NO | NULL | NULL |
| 2234 | 2410508 | 2410509 | 2430114 | 2431463 | 2529221 | 2529262 | NO | NULL | NULL |
| 2235 | 2502267 | 2502271 | 2523205 | 2523206 | 2562613 | 2562614 | NO | NULL | NULL |
| 2236 | 2511025 | 2511026 | 2531961 | 2532058 | 2701263 | 2701264 | NO | NULL | NULL |
| 2237 | 2544362 | 2544364 | 2566766 | 2566767 | 2721050 | 2721071 | NO | NULL | NULL |
| 2238 | 2592156 | 2592158 | 2614558 | 2614559 | 2790757 | 2790759 | NO | NULL | NULL |
| 2239 | 2673694 | 2673779 | 2705602 | 2705603 | 2846431 | 2846432 | NO | NULL | NULL |
| 2240 | 2692384 | 2692385 | 2724199 | 2724220 | 2953712 | 2953714 | NO | NULL | NULL |
| 2241 | 2752776 | 2752777 | 2784614 | 2785963 | 2977206 | 2977208 | NO | NULL | NULL |
| 2242 | 2762072 | 2762073 | 2795268 | 2795270 | 3088594 | 3088595 | NO | NULL | NULL |
| 2243 | 2938901 | 2938902 | 2982418 | 2982420 | 3113937 | 3114520 | NO | NULL | NULL |
| 2244 | 2947177 | 2947218 | 2990695 | 2990696 | 3114673 | 3114674 | NO | NULL | NULL |
| 2245 | 3075770 | 3075771 | 3119217 | 3119800 | 3116761 | 3116762 | NO | NULL | NULL |
| 2246 | 3075914 | 3076356 | 3119953 | 3119954 | 3117201 | 3117264 | NO | NULL | NULL |
| 2247 | 3076439 | 3076501 | 3120027 | 3120028 | 3150246 | 3150287 | NO | NULL | NULL |
| 2248 | 3078601 | 3078745 | 3122118 | 3122119 | 3220467 | 3220468 | NO | NULL | NULL |
| 2249 | 3078967 | 3078968 | 3122331 | 3122394 | 3233882 | 3233923 | NO | NULL | NULL |
| 2250 | 3112605 | 3112606 | 3156032 | 3156073 | 3285765 | 3285766 | NO | NULL | NULL |
| 2251 | 3196190 | 3196191 | 3239559 | 3239600 | 3330159 | 3330160 | NO | NULL | NULL |
| 2252 | 3248018 | 3248123 | 3291442 | 3291443 | 3345553 | 3345554 | NO | NULL | NULL |
| 2253 | 3293332 | 3293333 | 3336642 | 3336751 | 3370822 | 3370824 | NO | NULL | NULL |
| 2254 | 3307774 | 3307815 | 3351211 | 3351212 | 3475760 | 3475762 | NO | NULL | NULL |
| 2255 | 3313357 | 3313358 | 3356738 | 3356740 | 3561846 | 3561847 | NO | NULL | NULL |
| 2256 | 3371757 | 3371758 | 3415194 | 3415209 | 3585541 | 3585542 | NO | NULL | NULL |
| 2257 | 3430544 | 3430546 | 3473994 | 3473995 | 3589158 | 3589159 | NO | NULL | NULL |
| 2258 | 3436512 | 3436513 | 3479961 | 3479963 | 3589214 | 3589215 | NO | NULL | NULL |
| 2259 | 3484287 | 3486424 | 3529178 | 3529179 | 3589361 | 3589363 | NO | NULL | NULL |
| 2260 | 3508479 | 3508480 | 3551226 | 3552575 | 3590883 | 3590885 | NO | NULL | NULL |
| 2261 | 3508604 | 3508605 | 3552709 | 3554058 | 3590911 | 3590912 | NO | NULL | NULL |
| 2262 | 3513313 | 3513315 | 3558776 | 3558777 | 3685808 | 3685849 | NO | NULL | NULL |
| 2263 | 3521477 | 3521488 | 3566939 | 3566940 | 3702512 | 3702516 | NO | NULL | NULL |
| 2264 | 3545179 | 3545181 | 3590635 | 3590636 | 3717525 | 3717526 | NO | NULL | NULL |
| 2265 | 3545228 | 3545230 | 3590683 | 3590684 | 3747436 | 3747442 | NO | NULL | NULL |
| 2266 | 3549001 | 3549042 | 3594455 | 3594456 | 3787100 | 3787101 | NO | NULL | NULL |
| 2267 | 3662150 | 3662151 | 3707621 | 3707625 | 3811352 | 3811353 | NO | NULL | NULL |
| 2268 | 3706947 | 3706948 | 3753410 | 3753680 | 3835096 | 3835097 | NO | NULL | NULL |
| 2269 | 3708737 | 3708738 | 3755201 | 3755207 | 3864545 | 3864549 | NO | NULL | NULL |
| 2270 | 3748507 | 3748510 | 3794864 | 3794865 | 3864582 | 3864584 | NO | NULL | NULL |
| 2271 | 3748698 | 3748699 | 3795053 | 3796402 | 3903645 | 3903646 | NO | NULL | NULL |
| 2272 | 3772838 | 3773120 | 3820497 | 3820498 | 4017722 | 4017724 | NO | NULL | NULL |
| 2273 | 3810175 | 3810176 | 3862469 | 3862471 | 4086889 | 4086906 | NO | NULL | NULL |
| 2274 | 3826298 | 3826299 | 3878594 | 3878598 | 4091666 | 4091667 | NO | NULL | NULL |
| 2275 | 3826332 | 3826333 | 3878631 | 3878633 | 4109424 | 4109425 | NO | NULL | NULL |
| 2276 | 3968799 | 3968800 | 4025580 | 4025582 | 4160762 | 4160763 | NO | NULL | NULL |
| 2277 | 3999617 | 3999619 | 4056484 | 4056485 | 4348926 | 4348927 | NO | NULL | NULL |
| 2278 | 4031993 | 4031994 | 4094627 | 4094644 | 4366675 | 4366677 | NO | NULL | NULL |
| 2279 | 4036755 | 4036757 | 4099406 | 4099407 | | | NO | NULL | NULL |
| 2280 | 4094427 | 4094428 | 4156905 | 4156946 | | | NO | NULL | NULL |
| 2281 | 4133434 | 4133436 | 4197137 | 4197138 | | | NO | NULL | NULL |
| 2282 | 4134910 | 4134911 | 4198612 | 4198614 | | | NO | NULL | NULL |
| 2283 | 4254698 | 4254699 | 4318421 | 4318691 | | | NO | NULL | NULL |
| 2284 | 4274868 | 4274869 | 4338592 | 4338594 | | | NO | NULL | NULL |
| 2285 | 4308332 | 4308333 | 4374371 | 4374373 | | | NO | NULL | NULL |
| 2286 | 3076218 | 3076219 | 3122987 | 3123052 | | | NO | NULL | NULL |

Table II: List of insertion/deletions (indels) in Mycobacaterium tuberculosis/M. bovis BCG
Polymorphism ID: The ID by which the polymorphism can be identified
BCG Start: The position in the genome of M. bovis BCG at which insertion/deletion starts
BCG End: The position in the genome of M. bovis BCG at which insertion/deletion ends
H37Rv Start: The position in the genome of M. tuberculosis H37Rv at which insertion/deletion starts
H37Rv End: The position in the genome of M. tuberculosis H37Rv at which insertion/deletion ends
CDC1551 Start: The position in the genome of M. tuberculosis CDC1551 at which insertion/deletion starts
CDC1551 End: The position in the genome of M. tuberculosis CDC1551 at which insertion/deletion ends
ORF: Indicates whether the polymorphism occurs in an open reading frame (yes) or not (no)
GO ID: The ID for the sequence in the gene ontology database
Putative function: The putative function of the gene in which the SNP occurs.

[0245] TABLE 3
List of long polymorphisms in Mycobacterium tuberculosis/M. bovis BCG.

| Polymorphism | BCG | | H37Rv | H37Rv | | | | | |
|---|---|---|---|---|---|---|---|---|---|
| ID | Start | BCG End | start | end | CDC start | CDC end | ORF | GO ID | Putative Function |
| 2287 | 55529 | 55544 | 55543 | 55552 | 103765 | 105054 | Yes | P71707 | enzyme activity |
| 2288 | 103810 | 105100 | 103773 | 105062 | 103765 | 105054 | Yes | Q50655, | — |
| | | | | | | | | Q10891 | |
| 2289 | 337700 | 337733 | 336678 | 336711 | 103765 | 105054 | Yes | O53684 | — |
| 2290 | 339670 | 339722 | 338666 | 338718 | 103765 | 105054 | Yes | O53684 | — |
| 2291 | 468517 | 468610 | 467498 | 467589 | 103765 | 105054 | Yes | O53722 | — |
| 2292 | 840823 | 840895 | 838955 | 838967 | 103765 | 105054 | Yes | O53810 | — |
| 2293 | 891209 | 892235 | 889018 | 891403 | 103765 | 105054 | Yes | O07182 | DNA binding activity |
| 2294 | 928362 | 928365 | 927446 | 927461 | 103765 | 105054 | Yes | O53844 | — |
| 2295 | 1094366 | 1094867 | 1093925 | 1094414 | 103765 | 105054 | Yes | O53891 | — |
| 2296 | 1413023 | 1413095 | 1414785 | 1414947 | 103765 | 105054 | Yes | Q11053 | protein kinase activity |
| 2297 | 1466961 | 1466963 | 1468912 | 1468925 | 103765 | 105054 | Yes | Q10621 | DNA binding activity |
| 2298 | 1530977 | 1531052 | 1532940 | 1533015 | 103765 | 105054 | Yes | Q11031 | — |
| 2299 | 1531093 | 1531199 | 1533056 | 1533162 | 103765 | 105054 | Yes | Q11031 | — |
| 2300 | 1619416 | 1619437 | 1623086 | 1623088 | 103765 | 105054 | Yes | Null | — |
| 2301 | 1629885 | 1631221 | 1633536 | 1634635 | 103765 | 105054 | Yes | O06810 | — |
| 2302 | 1633501 | 1634095 | 1636765 | 1637347 | 103765 | 105054 | Yes | O06808 | — |
| 2303 | 1634927 | 1634959 | 1638179 | 1638211 | 103765 | 105054 | Yes | O06808 | — |
| 2304 | 1773935 | 1775045 | 1788567 | 1789677 | 103765 | 105054 | Yes | O06603, | — |
| | | | | | | | | O06602 | |
| 2305 | 1986939 | 1988741 | 1996098 | 1998299 | 103765 | 105054 | Yes | O06798 | nucleic acid binding |
| | | | | | | | | | activity |
| 2306 | 2156908 | 2157537 | 2165848 | 2165901 | 103765 | 105054 | Yes | O07716 | enzyme activity |
| 2307 | 2241088 | 2241814 | 2262170 | 2262896 | 103765 | 105054 | Yes | O53461 | nucleic acid binding |
| | | | | | | | | | activity |
| 2308 | 2278758 | 2278826 | 2294843 | 2294911 | 103765 | 105054 | Yes | O53490 | enzyme activity |
| 2309 | 2278938 | 2278961 | 2295023 | 2295046 | 103765 | 105054 | Yes | O53490 | enzyme activity |
| 2310 | 2279216 | 2280345 | 2295301 | 2296430 | 103765 | 105054 | Yes | O53490 | enzyme activity |
| 2311 | 2285306 | 2286046 | 2301391 | 2302131 | 103765 | 105054 | Yes | O53490 | enzyme activity |
| 2312 | 2501326 | 2501345 | 2522176 | 2522283 | 103765 | 105054 | Yes | Null | — |
| 2313 | 2604210 | 2605004 | 2635574 | 2636928 | 103765 | 105054 | Yes | P95248 | — |
| 2314 | 2912021 | 2912672 | 2944553 | 2945204 | 103765 | 105054 | Yes | O06199 | — |
| 2315 | 3079181 | 3079369 | 3122617 | 3123099 | 103765 | 105054 | Yes | Null | — |
| 2316 | 3079550 | 3079876 | 3123280 | 3123311 | 103765 | 105054 | Yes | Null | — |
| 2317 | 3189218 | 3189388 | 3232699 | 3232757 | 103765 | 105054 | Yes | Null | — |
| 2318 | 3204423 | 3204457 | 3247847 | 3247881 | 103765 | 105054 | Yes | Q10977 | enzyme activity |
| 2319 | 3334709 | 3334850 | 3378091 | 3378288 | 103765 | 105054 | Yes | P31500 | — |
| 2320 | 3336266 | 3336348 | 3379704 | 3379786 | 103765 | 105054 | Yes | O53268 | — |
| 2321 | 3689443 | 3689509 | 3732189 | 3735810 | 103765 | 105054 | Yes | O53393 | carboxypeptidase A |
| | | | | | | | | | activity |
| 2322 | 3689905 | 3689925 | 3736206 | 3736226 | 103765 | 105054 | Yes | O53393 | carboxypeptidase A |
| | | | | | | | | | activity |
| 2323 | 3692719 | 3692740 | 3739123 | 3739357 | 103765 | 105054 | Yes | O53395 | — |
| 2324 | 3703709 | 3703744 | 3750172 | 3750207 | 103765 | 105054 | Yes | O50378 | — |
| 2325 | 3838472 | 3838474 | 3890772 | 3892132 | 103765 | 105054 | Yes | Null | — |
| 2326 | 3876017 | 3876037 | 3930462 | 3930473 | 103765 | 105054 | Yes | O53552 | — |
| 2327 | 3878151 | 3878280 | 3932746 | 3932749 | 103765 | 105054 | Yes | O53553 | — |
| 2328 | 3879035 | 3879494 | 3933477 | 3934539 | 103765 | 105054 | Yes | O53553 | — |
| 2329 | 3879583 | 3879686 | 3934628 | 3934731 | 103765 | 105054 | Yes | O53553 | — |
| 2330 | 3879863 | 3880576 | 3934956 | 3936335 | 103765 | 105054 | Yes | O53553 | — |
| 2331 | 3885770 | 3886315 | 3941529 | 3941721 | 103765 | 105054 | Yes | O53556, | — |
| | | | | | | | | O53557 | |
| 2332 | 3887733 | 3887868 | 3943139 | 3943175 | 103765 | 105054 | Yes | O53557 | hydroxymethylglutaryl- |
| | | | | | | | | | CoA reductase (NADPH) |
| | | | | | | | | | activity |
| 2333 | 3890973 | 3891602 | 3946262 | 3946876 | 103765 | 105054 | Yes | O53559 | — |
| 2334 | 3891837 | 3892400 | 3947111 | 3947380 | 103765 | 105054 | Yes | O53559 | — |
| 2335 | 3892771 | 3892967 | 3948342 | 3949747 | 103765 | 105054 | Yes | O53559 | — |
| 2336 | 4127053 | 4127055 | 4189590 | 4190758 | 103765 | 105054 | Yes | O69705 | — |
| 2337 | 4189866 | 4189868 | 4253568 | 4253581 | 103765 | 105054 | Yes | Q10621 | DNA binding activity |
| 2338 | 4190616 | 4190621 | 4254329 | 4254345 | 103765 | 105054 | Yes | Null | — |
| 2339 | 1973115 | 1973588 | 2628042 | 2630136 | 103765 | 105054 | Yes | P95245, | — |
| | | | | | | | | P95246 | — |
| 2340 | 3079605 | 3079661 | 3119272 | 3119329 | 103765 | 105054 | Yes | Null | Null |
| 2341 | 1619416 | 1619437 | 1623086 | 1623088 | 1622970 | 1622972 | No | Null | Null |
| 2342 | 2501326 | 2501345 | 2522176 | 2522283 | 2354339 | 2354347 | No | Null | Null |
| 2343 | 3079181 | 3079369 | 3122617 | 3123099 | 2519450 | 2519556 | No | Null | Null |
| 2344 | 3079550 | 3079876 | 3123280 | 3123311 | 2520462 | 2520465 | No | Null | Null |
| 2345 | 3189218 | 3189388 | 3232699 | 3232757 | 2985403 | 2985518 | No | Null | Null |
| 2346 | 3838472 | 3838474 | 3890772 | 3892132 | 3018402 | 3018431 | No | Null | Null |
| 2347 | 4190616 | 4190621 | 4254329 | 4254345 | 3226853 | 3226952 | No | Null | Null |
| 2348 | 3079605 | 3079661 | 3119272 | 3119329 | 3589269 | 3589323 | No | Null | Null |
| 2349 | | | | | 4245189 | 4245204 | No | Null | Null |
| 2350 | | | | | 4246654 | 4246670 | No | Null | Null |
| 2351 | | | | | 3113992 | 3114049 | No | Null | Null |

Table III: List of long polymorphisms in Mycobacaterium tuberculosis/M. bovis BCG
Polymorphism ID: The ID by which the polymorphism can be identified
BCG Start: The position in the genome of M. bovis BCG at which multiple polymorhisms start occurring
BCG End: The position in the genome of M. bovis BCG at which multiple polymorhisms end
H37Rv Start: The position in the genome of M. tuberculosis H37Rv at which multiple polymorhisms start
H37Rv End: The position in the genome of M. tuberculosis H37Rv at multiple polymorhisms end
C1551 Start: The position in the genome of M. tuberculosis CDC1551 at which multiple polymorhisms start
CDC1551 End: The position in the genome of M. tuberculosis CDC1551 at which multiple polymorhisms ends
ORF: Indicates whether the polymorphism occurs in an open reading frame (yes) or not (no)
GO ID: The ID for the sequence in the gene ontology database
Putative function: The putative function of the gene in which the SNP occurs.

[0246] TABLE 4
a:
List of Polymorphisms (Single Nucleotide Polymorphisms) in genes involved in cell wall synthesis

| Polymorphism | | BCG | | Query | Query | Query | Query | | Type of | | Putative |
|---|---|---|---|---|---|---|---|---|---|---|---|
| ID | BCG Position | base | BCG AA | name | Position | base | aa | ORF | SNP | GO ID | Function |
| 48 | 53663 | T | L | H37Rv | 53677 | C | P | Yes | NS, NC | P71707 | Cell wall |
| | | | | | | | | | | | synthesis |
| 48 | 53663 | T | L | CDC1551 | 53623 | C | P | Yes | NS, NC | Q8VKS5 | Cell wall |
| | | | | | | | | | | | synthesis |
| 1014 | 2393645 | G | P | H37Rv | 2413129 | A | L | Yes | NS, NC | O06224 | Cell wall |
| | | | | | | | | | | | synthesis |
| 1014 | 2393645 | G | P | CDC1551 | 2411822 | A | L | Yes | NS, NC | O06224 | Cell wall |
| | | | | | | | | | | | synthesis |
| 1015 | 2393760 | A | L | H37Rv | 2413244 | C | V | Yes | NS, C | O06224 | Cell wall |
| | | | | | | | | | | | synthesis |
| 1015 | 2393760 | A | L | CDC1551 | 2411937 | C | V | Yes | NS, C | O06224 | Cell wall |
| | | | | | | | | | | | synthesis |
| 1240 | 2987804 | G | H | H37Rv | 3031165 | A | Y | Yes | NS, C | O07218 | Cell wall |
| | | | | | | | | | | | synthesis |
| 1240 | 2987804 | G | H | CDC1551 | 3026104 | A | Y | Yes | NS, C | O07218 | Cell wall |
| | | | | | | | | | | | synthesis |
| 1746 | 4176966 | T | I | H37Rv | 4240668 | C | T | Yes | NS, NC | P72059 | Cell wall |
| | | | | | | | | | | | synthesis |
| 1746 | 4176966 | T | I | CDC1551 | 4232983 | C | T | Yes | NS, NC | P72059 | Cell wall |
| | | | | | | | | | | | synthesis |
| 1749 | 4182846 | G | S | H37Rv | 4246548 | A | N | Yes | NS, C | P72030 | Cell wall |
| | | | | | | | | | | | synthesis |
| 1749 | 4182846 | G | S | CDC1551 | 4238863 | A | N | Yes | NS, C | P72030 | Cell wall |
| | | | | | | | | | | | synthesis |
| 1751 | 4183941 | C | A | H37Rv | 4247643 | A | E | Yes | NS, NC | P72030 | Cell wall |
| | | | | | | | | | | | synthesis |
| 1751 | 4183941 | C | A | CDC1551 | 4239958 | A | E | Yes | NS, NC | P72030 | Cell wall |
| | | | | | | | | | | | synthesis |

| | | | | | | | | |
|---|---|---|---|---|---|---|---|---|
| Polymorphism | | | | | | | | |
| ID | BCG start | BCG end | Query name | Query start | Query end | ORF | GO ID | Putative Function |

b:
List of Polymorphisms (Insertions/deletions) in genes involved in cell wall synthesis

| | | | | | | | | |
|---|---|---|---|---|---|---|---|---|
| 1906 | 936197 | 936204 | H37Rv | 935446 | 935447 | Yes | O53850 | Cell wall synthesis |
| 1947 | 1439690 | 1439691 | H37Rv | 1441542 | 1441686 | Yes | Q10614 | Cell wall synthesis |
| 2094 | 3294465 | 3294466 | H37Rv | 3337893 | 3337903 | Yes | P95114 | Cell wall synthesis |
| 1906 | 936197 | 936204 | CDC1551 | 935348 | 935349 | Yes | O53850 | Cell wall synthesis |
| 1947 | 1439690 | 1439691 | CDC1551 | 1441030 | 1441174 | Yes | Q10614 | Cell wall synthesis |
| 2094 | 3294465 | 3294466 | CDC1551 | 3332273 | 3332283 | Yes | P95114 | Cell wall synthesis |

c:
List of Polymorphisms (long polymorphisms) in genes involved in cell wall synthesis

| | | | | | | | | |
|---|---|---|---|---|---|---|---|---|
| 2287 | 55529 | 55544 | H37Rv | 55543 | 55552 | Yes | P71707 | Cell wall Synthesis |

Table IV: List of long polymorphisms in genes involved in cell wall synthesis
Polymorphism ID: The ID by which the polymorphism can be identified
BCG Start: The position in the genome of M. bovis BCG at which multiple polymorhisms start occurring
BCG End: The position in the genome of M. bovis BCG at which multiple polymorhisms end
H37Rv Start: The position in the genome of M. tuberculosis H37Rv at which multiple polymorhisms start
H37Rv End: The position in the genome of M. tuberculosis H37Rv at multiple polymorhisms end
C1551 Start: The position in the genome of M. tuberculosis CDC1551 at which multiple polymorhisms start
CDC1551 End: The position in the genome of M. tuberculosis CDC1551 at which multiple polymorhisms ends
ORF: Indicates whether the polymorphism occurs in an open reading frame (yes) or not (no)
GO ID: The ID for the sequence in the gene ontology database
Putative function: The putative function of the gene in which the SNP occurs.

[0247] TABLE 5
a: List of Polymorphisms (Single Nucleotide Polymorphisms) in transcription factors.

| Polymorphism | BCG | BCG | BCG | Query | Query | Query | Query | | Type of | | |
|---|---|---|---|---|---|---|---|---|---|---|---|
| ID | Position | base | AA | name | Position | base | aa | ORF | SNP | GO ID | Putative Function |
| 63 | 86899 | G | V | H37Rv | 86862 | A | I | Yes | NS, C | O53623 | Transcription factor |
| 63 | 86899 | G | V | CDC1551 | 86854 | A | I | Yes | NS, C | O53623 | Transcription factor |
| 188 | 366022 | T | V | H37Rv | 364973 | C | A | Yes | NS, C | O07229 | Transcription factor |
| 188 | 366022 | T | V | CDC1551 | 365037 | C | A | Yes | NS, C | O07229 | Transcription factor |
| 228 | 456342 | G | R | H37Rv | 455323 | C | P | Yes | NS, NC | O53712 | Transcription factor |
| 228 | 456342 | G | R | CDC1551 | 455414 | C | P | Yes | NS, NC | O53712 | Transcription factor |
| 231 | 467402 | C | A | H37Rv | 466383 | A | D | Yes | NS, NC | O53720 | Transcription factor |
| 231 | 467402 | C | A | CDC1551 | 466474 | A | D | Yes | NS, NC | O53720 | Transcription factor |
| 299 | 634973 | C | V | CDC1551 | 635181 | T | I | Yes | NS, C | Q8VKJ4 | Transcription factor |
| 313 | 671788 | A | H | H37Rv | 670543 | G | R | Yes | NS, NC | O53773 | Transcription factor |
| 313 | 671788 | A | H | CDC1551 | 671996 | G | R | Yes | NS, NC | O53773 | Transcription factor |
| 326 | 700963 | T | I | H37Rv | 699716 | C | V | Yes | NS, C | O07776 | Transcription factor |
| 326 | 700963 | T | I | CDC1551 | 701166 | C | V | Yes | NS, C | O07776 | Transcription factor |
| 405 | 912091 | C | P | H37Rv | 911259 | T | L | Yes | NS, NC | O53830 | Transcription factor |
| 405 | 912091 | C | P | CDC1551 | 911170 | T | L | Yes | NS, NC | O53830 | Transcription factor |
| 433 | 941645 | G | P | H37Rv | 940888 | C | A | Yes | NS, NC | O53856 | Transcription factor |
| 433 | 941645 | G | P | CDC1551 | 940790 | C | A | Yes | NS, NC | O53856 | Transcription factor |
| 483 | 1097474 | A | S | H37Rv | 1097021 | G | G | Yes | NS, NC | O53894 | Transcription factor |
| 483 | 1097474 | A | S | CDC1551 | 1097062 | G | G | Yes | NS, NC | O53894 | Transcription factor |
| 598 | 1375153 | G | P | H37Rv | 1373907 | A | S | Yes | NS, NC | O86313 | Transcription factor |
| 598 | 1375153 | G | P | CDC1551 | 1373397 | A | S | Yes | NS, NC | O86313 | Transcription factor |
| 611 | 1401640 | G | V | H37Rv | 1400394 | A | M | Yes | NS, NC | Q11039 | Transcription factor |
| 611 | 1401640 | G | V | CDC1551 | 1399883 | A | M | Yes | NS, NC | Q11039 | Transcription factor |
| 639 | 1476918 | T | * | H37Rv | 1478881 | C | W | Yes | NS, TP | Q10630 | Transcription factor |
| 639 | 1476918 | T | * | CDC1551 | 1478424 | C | W | Yes | NS, TP | Q10630 | Transcription factor |
| 640 | 1477120 | C | V | H37Rv | 1479083 | T | I | Yes | NS, C | Q10630 | Transcription factor |
| 640 | 1477120 | C | V | CDC1551 | 1478626 | T | I | Yes | NS, C | Q10630 | Transcription factor |
| 659 | 1524738 | T | V | H37Rv | 1526701 | G | G | Yes | NS, C | Q11028 | Transcription factor |
| 659 | 1524738 | T | V | CDC1551 | 1527918 | G | G | Yes | NS, C | Q8VK33 | Transcription factor |
| 660 | 1525971 | C | A | H37Rv | 1527934 | A | D | Yes | NS, NC | Q11028 | Transcription factor |
| 660 | 1525971 | C | A | CDC1551 | 1529151 | A | D | Yes | NS, NC | Q8VK33 | Transcription factor |
| 677 | 1534974 | T | T | H37Rv | 1536937 | C | A | Yes | NS, NC | Q11034 | Transcription factor |
| 677 | 1534974 | T | T | CDC1551 | 1538155 | C | A | Yes | NS, NC | Q11034 | Transcription factor |
| 700 | 1580686 | C | L | H37Rv | 1584377 | A | I | Yes | NS, C | P71675 | Transcription factor |
| 700 | 1580686 | C | L | CDC1551 | 1584233 | A | I | Yes | NS, C | P71675 | Transcription factor |
| 722 | 1643728 | T | V | H37Rv | 1646980 | C | A | Yes | NS, C | O53151 | Transcription factor |
| 722 | 1643728 | T | V | CDC1551 | 1647138 | C | A | Yes | NS, C | O53151 | Transcription factor |
| 801 | 1886196 | G | A | H37Rv | 1900798 | A | V | Yes | NS, C | O53922 | Transcription factor |
| 801 | 1886196 | G | A | CDC1551 | 1891602 | A | V | Yes | NS, C | O53922 | Transcription factor |
| 1061 | 2504215 | G | A | H37Rv | 2525150 | T | D | Yes | NS, NC | Q10528 | Transcription factor |
| 1061 | 2504215 | G | A | CDC1551 | 2522412 | T | D | Yes | NS, NC | Q10528 | Transcription factor |
| 1099 | 2609911 | G | R | H37Rv | 2641838 | A | H | Yes | NS, NC | O05839 | Transcription factor |
| 1099 | 2609911 | G | R | CDC1551 | 2639170 | A | H | Yes | NS, NC | O05839 | Transcription factor |
| 1174 | 2825466 | T | D | H37Rv | 2858667 | G | A | Yes | NS, NC | P95020 | Transcription factor |
| 1174 | 2825466 | T | D | CDC1551 | 2854156 | G | A | Yes | NS, NC | P95020 | Transcription factor |
| 1241 | 2988773 | C | A | H37Rv | 3032134 | T | V | Yes | NS, C | Q50765 | Transcription factor |
| 1241 | 2988773 | C | A | CDC1551 | 3027073 | T | V | Yes | NS, C | Q50765 | Transcription factor |
| 1261 | 3043278 | T | I | H37Rv | 3086725 | C | M | Yes | NS, NC | O33321 | Transcription factor |
| 1261 | 3043278 | T | I | CDC1551 | 3081450 | C | M | Yes | NS, NC | O33321 | Transcription factor |
| 1264 | 3053917 | C | A | H37Rv | 3097365 | A | D | Yes | NS, NC | O33330 | Transcription factor |
| 1264 | 3053917 | C | A | CDC1551 | 3092089 | A | D | Yes | NS, NC | O33330 | Transcription factor |
| 1405 | 3404010 | A | C | H37Rv | 3447460 | G | R | Yes | NS, NC | Q06861 | Transcription factor |
| 1405 | 3404010 | A | C | CDC1551 | 3443253 | G | R | Yes | NS, NC | Q06861 | Transcription factor |
| 1503 | 3626758 | A | V | H37Rv | 3672229 | G | A | Yes | NS, C | P96896 | Transcription factor |
| 1503 | 3626758 | A | V | CDC1551 | 3667068 | G | A | Yes | NS, C | P96896 | Transcription factor |

b: List of Polymorphisms (Insertions/Deletions) in transcription factors.

| Polymorphism | | | | | | | Functional | Putative |
|---|---|---|---|---|---|---|---|---|
| ID | BCG start | BCG end | Query name | Query start | Query end | ORF | Annotation | Function |
| 1849 | 194495 | 194498 | H37Rv | 194303 | 194304 | Yes | O07410 | Transcription |
| | | | | | | | | Factor |
| 2074 | 3042938 | 3042939 | H37Rv | 3086361 | 3086386 | Yes | O33321 | Transcription |
| | | | | | | | | Factor |
| 2199 | 4334624 | 4334625 | H37Rv | 4400660 | 4400662 | Yes | O53590 | Transcription |
| | | | | | | | | Factor |
| 1902 | 890037 | 890038 | CDC1551 | 889115 | 889117 | Yes | Q8VKD9 | Transcription |
| | | | | | | | | Factor |
| 1945 | 1404177 | 1404178 | CDC1551 | 1402420 | 1405418 | Yes | Q11063 | Transcription |
| | | | | | | | | Factor |
| 2074 | 3042938 | 3042939 | CDC1551 | 3081086 | 3081111 | Yes | O33321 | Transcription |
| | | | | | | | | Factor |

Table V: List of long polymorphisms in Transcription factors
Polymorphism ID The ID by which the polymorphism can be identified
BCG Start The position in the genome of M. bovis BCG at which multiple polymorhisms start occurring
BCG End The position in the genome of M. bovis BCG at which multiple polymorhisms end
H37Rv Start The position in the genome of M. tuberculosis H37Rv at which multiple polymorhisms start
H37Rv End The position in the genome of M. tuberculosis H37Rv at multiple polymorhisms end
C1551 Start The position in the genome of M. tuberculosis CDC1551 at which multiple polymorhisms start
CDC1551 End The position in the genome of M. tuberculosis CDC1551 at which multiple polymorhisms ends
ORF Indicates whether the polymorphism occurs in an open reading frame (yes) or not (no)
GO ID The ID for the sequence in the gene ontology database
Putative function The putative function of the gene in which the SNP occurs.

[0248] TABLE 6
a: List of Polymorphisms(Single Nucleotide Polymorphisms) in genes involved in lipid metabolism

| Polymorphism | BCG | BCG | BCG | Query | Query | Query | Query | | Type of | | Putative |
|---|---|---|---|---|---|---|---|---|---|---|---|
| ID | Position | base | AA | name | Position | base | aa | ORF | SNP | GO ID | Function |
| 29 | 26034 | G | P | H37Rv | 26053 | C | A | Yes | NS, NC | P71591 | Transport |
| 29 | 26034 | G | P | CDC1551 | 26035 | C | A | Yes | NS, NC | P71591 | Transport |
| 69 | 96136 | A | I | H37Rv | 96099 | G | V | Yes | NS, C | Q10884 | Transport |
| 72 | 100624 | G | A | H37Rv | 100587 | A | T | Yes | NS, NC | Q10876 | Transport |
| 72 | 100624 | G | A | CDC1551 | 100579 | A | T | Yes | NS, NC | Q10876 | Transport |
| 79 | 126600 | A | S | H37Rv | 126561 | C | A | Yes | NS, NC | Q10900 | Transport |
| 79 | 126600 | A | S | CDC1551 | 126554 | C | A | Yes | NS, NC | Q10900 | Transport |
| 80 | 126840 | G | P | H37Rv | 126801 | A | S | Yes | NS, NC | Q10900 | Transport |
| 80 | 126840 | G | P | CDC1551 | 126794 | A | S | Yes | NS, NC | Q10900 | Transport |
| 82 | 130172 | A | V | H37Rv | 130133 | G | A | Yes | NS, C | Q10900 | Transport |
| 82 | 130172 | A | V | CDC1551 | 130126 | G | A | Yes | NS, C | Q10900 | Transport |
| 99 | 170273 | G | L | H37Rv | 170081 | A | F | Yes | NS, NC | P96820 | Transport |
| 99 | 170273 | G | L | CDC1551 | 170254 | A | F | Yes | NS, NC | P96820 | Transport |
| 123 | 227215 | G | V | H37Rv | 227020 | A | I | Yes | NS, C | O53645 | Transport |
| 123 | 227215 | G | V | CDC1551 | 227134 | A | I | Yes | NS, C | Q8VKP9 | Transport |
| 124 | 227738 | T | M | H37Rv | 227543 | C | T | Yes | NS, NC | O53645 | Transport |
| 124 | 227738 | T | M | CDC1551 | 227657 | C | T | Yes | NS, NC | Q8VKP9 | Transport |
| 125 | 228053 | T | L | H37Rv | 227858 | C | P | Yes | NS, NC | O53645 | Transport |
| 125 | 228053 | T | L | CDC1551 | 227972 | C | P | Yes | NS, NC | Q8VKP9 | Transport |
| 141 | 262385 | A | N | H37Rv | 262158 | G | D | Yes | NS, NC | P96400 | Transport |
| 141 | 262385 | A | N | CDC1551 | 262274 | G | D | Yes | NS, NC | P96400 | Transport |
| 156 | 292523 | G | A | H37Rv | 294196 | T | E | Yes | NS, NC | O53666 | Transport |
| 156 | 292523 | G | A | CDC1551 | 294313 | T | E | Yes | NS, NC | O53666 | Transport |
| 157 | 292778 | C | R | H37Rv | 294451 | T | K | Yes | NS, C | O53666 | Transport |
| 157 | 292778 | C | R | CDC1551 | 294568 | T | K | Yes | NS, C | O53666 | Transport |
| 201 | 394778 | A | Y | H37Rv | 393746 | G | H | Yes | NS, C | O08447 | Transport |
| 201 | 394778 | A | Y | CDC1551 | 393808 | G | H | Yes | NS, C | O08447 | Transport |
| 218 | 441762 | C | A | H37Rv | 440743 | T | V | Yes | NS, C | O06312 | Transport |
| 218 | 441762 | C | A | CDC1551 | 440833 | T | V | Yes | NS, C | O06312 | Transport |
| 221 | 446432 | T | S | H37Rv | 445413 | C | G | Yes | NS, NC | O53703 | Transport |
| 221 | 446432 | T | S | CDC1551 | 445503 | C | G | Yes | NS, NC | O53703 | Transport |
| 222 | 446797 | T | H | H37Rv | 445778 | C | R | Yes | NS, NC | O53703 | Transport |
| 29 | 26034 | G | P | H37Rv | 26053 | C | A | Yes | NS, NC | P71591 | Transport |
| 222 | 446797 | T | H | CDC1551 | 445868 | C | R | Yes | NS, NC | O53703 | Transport |
| 226 | 452456 | G | S | H37Rv | 451437 | A | F | Yes | NS, NC | O53708 | Transport |
| 226 | 452456 | G | S | CDC1551 | 451527 | A | F | Yes | NS, NC | O53708 | Transport |
| 234 | 472937 | G | A | H37Rv | 471916 | A | V | Yes | NS, C | P95200 | Transport |
| 234 | 472937 | G | A | CDC1551 | 472009 | A | V | Yes | NS, C | P95200 | Transport |
| 247 | 502639 | T | V | H37Rv | 501618 | C | A | Yes | NS, C | P96261 | Transport |
| 247 | 502639 | T | V | CDC1551 | 503069 | C | A | Yes | NS, C | P96261 | Transport |
| 250 | 515676 | G | A | H37Rv | 514655 | T | E | Yes | NS, NC | P96271 | Transport |
| 250 | 515676 | G | A | CDC1551 | 516106 | T | E | Yes | NS, NC | P96271 | Transport |
| 280 | 582972 | A | F | H37Rv | 581819 | G | L | Yes | NS, NC | Q11157 | Transport |
| 280 | 582972 | A | F | CDC1551 | 583188 | G | L | Yes | NS, NC | Q11157 | Transport |
| 383 | 846049 | C | V | H37Rv | 843857 | T | I | Yes | NS, C | O53815 | Transport |
| 383 | 846049 | C | V | CDC1551 | 846000 | T | I | Yes | NS, C | O53815 | Transport |
| 384 | 846399 | G | A | H37Rv | 844207 | A | V | Yes | NS, C | O53815 | Transport |
| 384 | 846399 | G | A | CDC1551 | 846350 | A | V | Yes | NS, C | O53815 | Transport |
| 406 | 913660 | G | L | H37Rv | 912828 | C | F | Yes | NS, NC | O53832 | Transport |
| 406 | 913660 | G | L | CDC1551 | 912739 | C | F | Yes | NS, NC | O53832 | Transport |
| 468 | 1041172 | C | A | H37Rv | 1040704 | A | S | Yes | NS, NC | O05870 | Transport |
| 468 | 1041172 | C | A | CDC1551 | 1040719 | A | S | Yes | NS, NC | O05870 | Transport |
| 469 | 1043636 | C | A | H37Rv | 1043167 | T | V | Yes | NS, C | P15712 | Transport |
| 469 | 1043636 | C | A | CDC1551 | 1043182 | T | V | Yes | NS, C | P15712 | Transport |
| 477 | 1080631 | A | N | H37Rv | 1080190 | G | D | Yes | NS, NC | P77894 | Transport |
| 477 | 1080631 | A | N | CDC1551 | 1080205 | G | D | Yes | NS, NC | P77894 | Transport |
| 478 | 1083482 | A | H | H37Rv | 1083041 | C | Q | Yes | NS, NC | P71539 | Transport |
| 478 | 1083482 | A | H | CDC1551 | 1083056 | C | Q | Yes | NS, NC | P71539 | Transport |
| 483 | 1097474 | A | S | H37Rv | 1097021 | G | G | Yes | NS, NC | O53894 | Transport |
| 483 | 1097474 | A | S | CDC1551 | 1097062 | G | G | Yes | NS, NC | O53894 | Transport |
| 485 | 1102935 | T | L | H37Rv | 1102482 | G | V | Yes | NS, C | O53899 | Transport |
| 485 | 1102935 | T | L | CDC1551 | 1102523 | G | V | Yes | NS, C | O53899 | Transport |
| 561 | 1290071 | C | L | H37Rv | 1288697 | G | V | Yes | NS, C | O06559 | Transport |
| 561 | 1290071 | C | L | CDC1551 | 1288187 | G | V | Yes | NS, C | O06559 | Transport |
| 562 | 1291161 | G | G | H37Rv | 1289787 | A | D | Yes | NS, NC | O06559 | Transport |
| 29 | 26034 | G | P | H37Rv | 26053 | C | A | Yes | NS, NC | P71591 | Transport |
| 562 | 1291161 | G | G | CDC1551 | 1289277 | A | D | Yes | NS, NC | O06559 | Transport |
| 563 | 1295376 | T | V | H37Rv | 1294002 | C | A | Yes | NS, C | O06562 | Transport |
| 563 | 1295376 | T | V | CDC1551 | 1293492 | C | A | Yes | NS, C | O06562 | Transport |
| 567 | 1307530 | C | S | H37Rv | 1306279 | A | I | Yes | NS, NC | O50431 | Transport |
| 567 | 1307530 | C | S | CDC1551 | 1305769 | A | I | Yes | NS, NC | O50431 | Transport |
| 568 | 1309207 | T | N | H37Rv | 1307956 | G | T | Yes | NS, C | O50431 | Transport |
| 568 | 1309207 | T | N | CDC1551 | 1307446 | G | T | Yes | NS, C | O50431 | Transport |
| 595 | 1368728 | G | G | H37Rv | 1367482 | T | W | Yes | NS, NC | O33220 | Transport |
| 595 | 1368728 | G | G | CDC1551 | 1366972 | T | W | Yes | NS, NC | O33220 | Transport |
| 602 | 1383703 | C | R | H37Rv | 1382457 | T | H | Yes | NS, NC | O50455 | Transport |
| 602 | 1383703 | C | R | CDC1551 | 1381947 | T | H | Yes | NS, NC | O50455 | Transport |
| 609 | 1396254 | G | G | H37Rv | 1395008 | A | R | Yes | NS, NC | O50465 | Transport |
| 609 | 1396254 | G | G | CDC1551 | 1394497 | A | R | Yes | NS, NC | O50465 | Transport |
| 780 | 1825125 | C | R | H37Rv | 1839757 | G | G | Yes | NS, NC | O06151 | Transport |
| 780 | 1825125 | C | R | CDC1551 | 1830666 | G | G | Yes | NS, NC | O06151 | Transport |
| 805 | 1897364 | A | F | H37Rv | 1912022 | C | V | Yes | NS, NC | O33188 | Transport |
| 805 | 1897364 | A | F | CDC1551 | 1902826 | C | V | Yes | NS, NC | O33188 | Transport |
| 815 | 1921036 | G | A | H37Rv | 1935693 | T | S | Yes | NS, NC | O33206 | Transport |
| 815 | 1921036 | G | A | CDC1551 | 1926497 | T | S | Yes | NS, NC | O33206 | Transport |
| 816 | 1921535 | A | Q | H37Rv | 1936192 | G | R | Yes | NS, NC | O33206 | Transport |
| 816 | 1921535 | A | Q | CDC1551 | 1926996 | G | R | Yes | NS, NC | O33206 | Transport |
| 822 | 1937372 | C | P | H37Rv | 1952030 | G | A | Yes | NS, NC | P71984 | Transport |
| 822 | 1937372 | C | P | CDC1551 | 1942833 | G | A | Yes | NS, NC | P71984 | Transport |
| 823 | 1938167 | T | Y | H37Rv | 1952825 | C | H | Yes | NS, C | P71984 | Transport |
| 823 | 1938167 | T | Y | CDC1551 | 1943628 | C | H | Yes | NS, C | P71984 | Transport |
| 828 | 1949354 | C | G | H37Rv | 1963955 | T | D | Yes | NS, NC | P71994 | Transport |
| 828 | 1949354 | C | G | CDC1551 | 1954815 | T | D | Yes | NS, NC | P71994 | Transport |
| 829 | 1949427 | G | H | H37Rv | 1964028 | C | D | Yes | NS, NC | P71994 | Transport |
| 829 | 1949427 | G | H | CDC1551 | 1954888 | C | D | Yes | NS, NC | P71994 | Transport |
| 840 | 1965950 | C | T | H37Rv | 1980550 | T | M | Yes | NS, NC | O65936 | Transport |
| 840 | 1965950 | C | T | CDC1551 | 1971410 | T | M | Yes | NS, NC | O65936 | Transport |
| 849 | 2002085 | G | Q | H37Rv | 2011625 | C | H | Yes | NS, NC | O33180 | Transport |
| 29 | 26034 | G | P | H37Rv | 26053 | C | A | Yes | NS, NC | P71591 | Transport |
| 849 | 2002085 | G | Q | CDC1551 | 2009047 | C | H | Yes | NS, NC | O33180 | Transport |
| 879 | 2042298 | T | * | H37Rv | 2051841 | C | Q | Yes | NS, TP | O53958 | Transport |
| 879 | 2042298 | T | * | CDC1551 | 2049263 | C | Q | Yes | NS, TP | Q8VJW0 | Transport |
| 880 | 2043142 | C | S | H37Rv | 2052685 | G | * | Yes | NS, TP | O53958 | Transport |
| 880 | 2043142 | C | S | CDC1551 | 2050107 | G | * | Yes | NS, TP | Q8VJW0 | Transport |
| 885 | 2053386 | C | V | H37Rv | 2062920 | T | I | Yes | NS, C | Q50614 | Transport |
| 885 | 2053386 | C | V | CDC1551 | 2060259 | T | I | Yes | NS, C | Q50614 | Transport |
| 886 | 2054840 | G | A | H37Rv | 2064374 | A | V | Yes | NS, C | Q50614 | Transport |
| 886 | 2054840 | G | A | CDC1551 | 2061713 | A | V | Yes | NS, C | Q50614 | Transport |
| 904 | 2092402 | A | W | H37Rv | 2102191 | G | R | Yes | NS, NC | P95160 | Transport |
| 904 | 2092402 | A | W | CDC1551 | 2099413 | G | R | Yes | NS, NC | P95160 | Transport |
| 907 | 2097719 | T | M | H37Rv | 2107509 | C | T | Yes | NS, NC | P95155 | Transport |
| 907 | 2097719 | T | M | CDC1551 | 2104731 | C | T | Yes | NS, NC | P95155 | Transport |
| 914 | 2112834 | G | A | H37Rv | 2122623 | A | V | Yes | NS, C | P95143 | Transport |
| 914 | 2112834 | G | A | CDC1551 | 2119846 | A | V | Yes | NS, C | P95143 | Transport |
| 915 | 2113185 | G | A | H37Rv | 2122974 | C | G | Yes | NS, C | P95143 | Transport |
| 915 | 2113185 | G | A | CDC1551 | 2120197 | C | G | Yes | NS, C | P95143 | Transport |
| 929 | 2141958 | T | T | H37Rv | 2151676 | G | P | Yes | NS, NC | O07727 | Transport |
| 929 | 2141958 | T | T | CDC1551 | 2148969 | G | P | Yes | NS, NC | O07727 | Transport |
| 930 | 2145004 | A | L | H37Rv | 2154722 | C | R | Yes | NS, NC | Q08129 | Transport |
| 930 | 2145004 | A | L | CDC1551 | 2152015 | C | R | Yes | NS, NC | Q08129 | Transport |
| 953 | 2201224 | C | G | H37Rv | 2222306 | T | D | Yes | NS, NC | Q10875 | Transport |
| 953 | 2201224 | C | G | CDC1551 | 2219640 | T | D | Yes | NS, NC | Q10875 | Transport |
| 980 | 2271395 | A | V | H37Rv | 2287480 | G | A | Yes | NS, C | O53485 | Transport |
| 980 | 2271395 | A | V | CDC1551 | 2289814 | G | A | Yes | NS, C | O53485 | Transport |
| 1008 | 2369039 | A | D | H37Rv | 2388639 | G | G | Yes | NS, NC | O33261 | Transport |
| 1009 | 2369143 | A | S | H37Rv | 2388743 | G | G | Yes | NS, NC | O33261 | Transport |
| 1009 | 2369143 | A | S | CDC1551 | 2387320 | G | G | Yes | NS, NC | O33261 | Transport |
| 1036 | 2438267 | C | I | H37Rv | 2459232 | G | M | Yes | NS, NC | Q10387 | Transport |
| 1036 | 2438267 | C | I | CDC1551 | 2456567 | G | M | Yes | NS, NC | Q10387 | Transport |
| 1062 | 2507835 | A | V | H37Rv | 2528771 | G | A | Yes | NS, C | O53528 | Transport |
| 1062 | 2507835 | A | V | CDC1551 | 2526031 | G | A | Yes | NS, C | O53528 | Transport |
| 29 | 26034 | G | P | H37Rv | 26053 | C | A | Yes | NS, NC | P71591 | Transport |
| 1077 | 2541551 | C | A | H37Rv | 2563956 | A | E | Yes | NS, NC | Q59570 | Transport |
| 1077 | 2541551 | C | A | CDC1551 | 2559803 | A | E | Yes | NS, NC | Q59570 | Transport |
| 1086 | 2569172 | G | V | H37Rv | 2591575 | C | L | Yes | NS, C | P71894 | Transport |
| 1086 | 2569172 | G | V | CDC1551 | 2587422 | C | L | Yes | NS, C | Q8VJL6 | Transport |
| 1110 | 2660947 | A | N | H37Rv | 2692873 | G | S | Yes | NS, C | P71748 | Transport |
| 1110 | 2660947 | A | N | CDC1551 | 2690205 | G | S | Yes | NS, C | P71748 | Transport |
| 1112 | 2661841 | G | S | H37Rv | 2693770 | A | N | Yes | NS, C | P71748 | Transport |
| 1112 | 2661841 | G | S | CDC1551 | 2691102 | A | N | Yes | NS, C | P71748 | Transport |
| 1113 | 2663078 | T | H | H37Rv | 2695007 | C | R | Yes | NS, NC | P71746 | Transport |
| 1113 | 2663078 | T | H | CDC1551 | 2692339 | C | R | Yes | NS, NC | P71746 | Transport |
| 1138 | 2729181 | A | I | H37Rv | 2761016 | G | M | Yes | NS, NC | O53186 | Transport |
| 1138 | 2729181 | A | I | CDC1551 | 2757863 | G | M | Yes | NS, NC | O53186 | Transport |
| 1139 | 2733102 | A | L | H37Rv | 2764937 | G | P | Yes | NS, NC | O53189 | Transport |
| 1139 | 2733102 | A | L | CDC1551 | 2761784 | G | P | Yes | NS, NC | O53189 | Transport |
| 1192 | 2880160 | G | P | H37Rv | 2912710 | T | T | Yes | NS, NC | Q50635 | Transport |
| 1192 | 2880160 | G | P | CDC1551 | 2908855 | T | T | Yes | NS, NC | Q50635 | Transport |
| 1193 | 2880535 | T | T | H37Rv | 2913085 | C | A | Yes | NS, NC | Q50635 | Transport |
| 1193 | 2880535 | T | T | CDC1551 | 2909230 | C | A | Yes | NS, NC | Q50635 | Transport |
| 1194 | 2881707 | C | S | H37Rv | 2914257 | T | N | Yes | NS, C | Q50634 | Transport |
| 1194 | 2881707 | C | S | CDC1551 | 2910402 | T | N | Yes | NS, C | Q50634 | Transport |
| 1216 | 2935735 | C | A | H37Rv | 2968270 | T | V | Yes | NS, C | P71942 | Transport |
| 1216 | 2935735 | C | A | CDC1551 | 2964416 | T | V | Yes | NS, C | P71942 | Transport |
| 1227 | 2959751 | G | G | H37Rv | 3003112 | C | A | Yes | NS, C | O07187 | Transport |
| 1227 | 2959751 | G | G | CDC1551 | 2998058 | C | A | Yes | NS, C | O07187 | Transport |
| 1228 | 2959795 | T | C | H37Rv | 3003156 | G | G | Yes | NS, NC | O07187 | Transport |
| 1228 | 2959795 | T | C | CDC1551 | 2998102 | G | G | Yes | NS, NC | O07187 | Transport |
| 1230 | 2963874 | G | R | H37Rv | 3007235 | A | * | Yes | NS, TP | O07192 | Transport |
| 1230 | 2963874 | G | R | CDC1551 | 3002180 | A | * | Yes | NS, TP | O07192 | Transport |
| 1231 | 2967056 | G | V | H37Rv | 3010417 | A | I | Yes | NS, C | O07194 | Transport |
| 1231 | 2967056 | G | V | CDC1551 | 3005362 | A | I | Yes | NS, C | O07194 | Transport |
| 1242 | 2993548 | G | T | H37Rv | 3036909 | A | I | Yes | NS, NC | O33229 | Transport |
| 1242 | 2993548 | G | T | CDC1551 | 3031848 | A | I | Yes | NS, NC | O33229 | Transport |
| 29 | 26034 | G | P | H37Rv | 26053 | C | A | Yes | NS, NC | P71591 | Transport |
| 1243 | 2993831 | C | A | H37Rv | 3037192 | G | P | Yes | NS, NC | O33229 | Transport |
| 1243 | 2993831 | C | A | CDC1551 | 3032131 | G | P | Yes | NS, NC | O33229 | Transport |
| 1292 | 3096227 | G | P | H37Rv | 3139653 | C | A | Yes | NS, NC | P71619 | Transport |
| 1292 | 3096227 | G | P | CDC1551 | 3133869 | C | A | Yes | NS, NC | Q8VJC1 | Transport |
| 1293 | 3096535 | A | L | H37Rv | 3139961 | G | P | Yes | NS, NC | P71619 | Transport |
| 1294 | 3096724 | A | I | H37Rv | 3140150 | C | S | Yes | NS, NC | P71619 | Transport |
| 1296 | 3099150 | A | L | H37Rv | 3142577 | G | P | Yes | NS, NC | P71616 | Transport |
| 1296 | 3099150 | A | L | CDC1551 | 3136791 | G | P | Yes | NS, NC | P71616 | Transport |
| 1332 | 3192343 | C | G | H37Rv | 3235712 | G | R | Yes | NS, NC | Q10970 | Transport |
| 1332 | 3192343 | C | G | CDC1551 | 3230035 | G | R | Yes | NS, NC | Q10970 | Transport |
| 1333 | 3193344 | C | R | H37Rv | 3236713 | A | L | Yes | NS, NC | Q10970 | Transport |
| 1333 | 3193344 | C | R | CDC1551 | 3231036 | A | L | Yes | NS, NC | Q10970 | Transport |
| 1345 | 3229711 | G | D | H37Rv | 3273135 | C | H | Yes | NS, NC | P96205 | Transport |
| 1345 | 3229711 | G | D | CDC1551 | 3267458 | C | H | Yes | NS, NC | P96205 | Transport |
| 1387 | 3343657 | A | V | H37Rv | 3387094 | G | A | Yes | NS, C | O53275 | Transport |
| 1387 | 3343657 | A | V | CDC1551 | 3382833 | G | A | Yes | NS, C | O53275 | Transport |
| 1396 | 3377371 | G | G | H37Rv | 3420822 | A | D | Yes | NS, NC | P95099 | Transport |
| 1396 | 3377371 | G | G | CDC1551 | 3416547 | A | D | Yes | NS, NC | P95099 | Transport |
| 1416 | 3430975 | A | I | H37Rv | 3474424 | G | V | Yes | NS, C | O05783 | Transport |
| 1416 | 3430975 | A | I | CDC1551 | 3470223 | G | V | Yes | NS, C | O05783 | Transport |
| 1417 | 3431707 | G | D | H37Rv | 3475156 | A | N | Yes | NS, NC | O05783 | Transport |
| 1417 | 3431707 | G | D | CDC1551 | 3470955 | A | N | Yes | NS, NC | O05783 | Transport |
| 1447 | 3476153 | G | A | H37Rv | 3521041 | A | T | Yes | NS, NC | P95173 | Transport |
| 1447 | 3476153 | G | A | CDC1551 | 3516528 | A | T | Yes | NS, NC | P95173 | Transport |
| 1453 | 3488207 | G | L | H37Rv | 3530952 | C | V | Yes | NS, C | O53311 | Transport |
| 1453 | 3488207 | G | L | CDC1551 | 3528588 | C | V | Yes | NS, C | O53311 | Transport |
| 1454 | 3489142 | T | E | H37Rv | 3531888 | G | D | Yes | NS, C | O53313 | Transport |
| 1454 | 3489142 | T | E | CDC1551 | 3529524 | G | D | Yes | NS, C | O53313 | Transport |
| 1466 | 3528181 | C | D | H37Rv | 3573633 | T | N | Yes | NS, NC | O53346 | Transport |
| 1466 | 3528181 | C | D | CDC1551 | 3568540 | T | N | Yes | NS, NC | O53346 | Transport |
| 1479 | 3562541 | A | C | H37Rv | 3607938 | G | R | Yes | NS, NC | O05875 | Transport |
| 1479 | 3562541 | A | C | CDC1551 | 3602842 | G | R | Yes | NS, NC | O05875 | Transport |
| 29 | 26034 | G | P | H37Rv | 26053 | C | A | Yes | NS, NC | P71591 | Transport |
| 1482 | 3569604 | T | H | H37Rv | 3615000 | C | R | Yes | NS, NC | O05884 | Transport |
| 1482 | 3569604 | T | H | CDC1551 | 3609903 | C | R | Yes | NS, NC | Q8VJ44 | Transport |
| 1499 | 3619961 | A | D | H37Rv | 3665432 | G | G | Yes | NS, NC | P96888 | Transport |
| 1499 | 3619961 | A | D | CDC1551 | 3660271 | G | G | Yes | NS, NC | P96888 | Transport |
| 1511 | 3644541 | G | S | H37Rv | 3690012 | A | L | Yes | NS, NC | O53355 | Transport |
| 1511 | 3644541 | G | S | CDC1551 | 3684851 | A | L | Yes | NS, NC | Q8VJ36 | Transport |
| 1512 | 3645379 | C | A | H37Rv | 3690850 | T | T | Yes | NS, NC | O53355 | Transport |
| 1512 | 3645379 | C | A | CDC1551 | 3685689 | T | T | Yes | NS, NC | Q8VJ36 | Transport |
| 1520 | 3661401 | G | E | H37Rv | 3706872 | C | D | Yes | NS, C | O53371 | Transport |
| 1520 | 3661401 | G | E | CDC1551 | 3701763 | C | D | Yes | NS, C | O53371 | Transport |
| 1587 | 3816846 | A | D | H37Rv | 3869141 | C | A | Yes | NS, NC | O33354 | Transport |
| 1587 | 3816846 | A | D | CDC1551 | 3855093 | C | A | Yes | NS, NC | O33354 | Transport |
| 1608 | 3839628 | A | V | H37Rv | 3893286 | G | A | Yes | NS, C | O06339 | Transport |
| 1608 | 3839628 | A | V | CDC1551 | 3887122 | G | A | Yes | NS, C | O06339 | Transport |
| 1609 | 3839818 | A | F | H37Rv | 3893476 | G | L | Yes | NS, NC | O06339 | Transport |
| 1609 | 3839818 | A | F | CDC1551 | 3887312 | G | L | Yes | NS, NC | O06339 | Transport |
| 1621 | 3869973 | T | V | H37Rv | 3924346 | C | A | Yes | NS, C | O53550 | Transport |
| 1621 | 3869973 | T | V | CDC1551 | 3918182 | C | A | Yes | NS, C | O53550 | Transport |
| 1638 | 3947819 | G | R | H37Rv | 4004600 | A | Q | Yes | NS, NC | P96845 | Transport |
| 1638 | 3947819 | G | R | CDC1551 | 3996744 | A | Q | Yes | NS, NC | P96845 | Transport |
| 1639 | 3948329 | C | S | H37Rv | 4005110 | G | W | Yes | NS, NC | P96845 | Transport |
| 1639 | 3948329 | C | S | CDC1551 | 3997254 | G | W | Yes | NS, NC | P96845 | Transport |
| 1640 | 3951962 | G | T | H37Rv | 4008744 | A | I | Yes | NS, NC | P96849 | Transport |
| 1640 | 3951962 | G | T | CDC1551 | 4000886 | A | I | Yes | NS, NC | P96849 | Transport |
| 1644 | 3964308 | T | S | H37Rv | 4021090 | G | A | Yes | NS, NC | P96860 | Transport |
| 1644 | 3964308 | T | S | CDC1551 | 4013232 | G | A | Yes | NS, NC | P96860 | Transport |
| 1682 | 4043080 | C | G | H37Rv | 4105730 | T | E | Yes | NS, NC | O69634 | Transport |
| 1682 | 4043080 | C | G | CDC1551 | 4097990 | T | E | Yes | NS, NC | O69634 | Transport |
| 1683 | 4043104 | T | Q | H37Rv | 4105754 | C | R | Yes | NS, NC | O69634 | Transport |
| 1683 | 4043104 | T | Q | CDC1551 | 4098014 | C | R | Yes | NS, NC | O69634 | Transport |
| 1684 | 4044421 | C | R | H37Rv | 4107071 | T | Q | Yes | NS, NC | O69634 | Transport |
| 1684 | 4044421 | C | R | CDC1551 | 4099331 | T | Q | Yes | NS, NC | O69634 | Transport |
| 29 | 26034 | G | P | H37Rv | 26053 | C | A | Yes | NS, NC | P71591 | Transport |
| 1692 | 4065667 | G | Q | H37Rv | 4128317 | C | E | Yes | NS, NC | O69653 | Transport |
| 1692 | 4065667 | G | Q | CDC1551 | 4120575 | C | E | Yes | NS, NC | O69653 | Transport |
| 1716 | 4113722 | A | R | H37Rv | 4176259 | G | G | Yes | NS, NC | O69695 | Transport |
| 1716 | 4113722 | A | R | CDC1551 | 4168574 | G | G | Yes | NS, NC | O69695 | Transport |
| 1790 | 4266511 | T | H | H37Rv | 4330235 | C | R | Yes | NS, NC | P96219 | Transport |
| 1790 | 4266511 | T | H | CDC1551 | 4322561 | C | R | Yes | NS, NC | P96219 | Transport |
| 1824 | 4335857 | G | G | H37Rv | 4401894 | A | D | Yes | NS, NC | P52214 | Transport |
| 1824 | 4335857 | G | G | CDC1551 | 4394201 | A | D | Yes | NS, NC | P52214 | Transport |

b: List of Polymorphisms(Insertions/Deletions) in genes involved in lipid metabolism

| Polymorphism | BCG | BCG | Query | Query | Query | | | Putative |
|---|---|---|---|---|---|---|---|---|
| ID | start | end | name | start | end | ORF | GO ID | Function |
| 1837 | 82490 | 82491 | H37Rv | 82452 | 82454 | Yes | O53618 | Transport |
| 1838 | 125870 | 125872 | H37Rv | 125832 | 125833 | Yes | Q10900 | Transport |
| 1854 | 257984 | 258014 | H37Rv | 257786 | 257787 | Yes | P96397 | Transport |
| 1883 | 669950 | 669952 | H37Rv | 668706 | 668707 | Yes | O53772 | Transport |
| 1902 | 890037 | 890038 | H37Rv | 887845 | 887847 | Yes | O07268 | Transport |
| 1917 | 1041920 | 1041922 | H37Rv | 1041452 | 1041453 | Yes | P95302 | Transport |
| 1919 | 1087886 | 1087887 | H37Rv | 1087445 | 1087447 | Yes | O86319 | Transport |
| 1946 | 1407255 | 1407256 | H37Rv | 1409016 | 1409018 | Yes | Q11058 | Transport |
| 1964 | 1744186 | 1744191 | H37Rv | 1760169 | 1760170 | Yes | Q10761 | Transport |
| 1971 | 1879687 | 1879698 | H37Rv | 1894299 | 1894300 | Yes | O53916 | Transport |
| 1994 | 2116913 | 2116915 | H37Rv | 2126702 | 2126703 | Yes | O07753 | Transport |
| 2006 | 2184230 | 2184231 | H37Rv | 2192593 | 2192595 | Yes | P95275 | Transport |
| 2032 | 2504789 | 2504790 | H37Rv | 2525724 | 2525726 | Yes | O53525 | Transport |
| 2037 | 2540853 | 2540854 | H37Rv | 2563256 | 2563259 | Yes | Q59570 | Transport |
| 2040 | 2584392 | 2584410 | H37Rv | 2606795 | 2606796 | Yes | P71879 | Transport |
| 2044 | 2661152 | 2661153 | H37Rv | 2693078 | 2693088 | Yes | P71748 | Transport |
| 2075 | 3043634 | 3043635 | H37Rv | 3087081 | 3087083 | Yes | P30234 | Transport |
| 2084 | 3098539 | 3098540 | H37Rv | 3141965 | 3141967 | Yes | P71617 | Transport |
| 2099 | 3381643 | 3381645 | H37Rv | 3425094 | 3425095 | Yes | P95097 | Transport |
| 2103 | 3455437 | 3456765 | H37Rv | 3501662 | 3501663 | Yes | P95191 | Transport |
| 2163 | 3898149 | 3898150 | H37Rv | 3954929 | 3954931 | Yes | O53563 | Transport |
| 1837 | 82490 | 82491 | CDC1551 | 82444 | 82446 | Yes | O53618 | Transport |
| 1854 | 257984 | 258014 | CDC1551 | 257902 | 257903 | Yes | P96397 | Transport |
| 1883 | 669950 | 669952 | CDC1551 | 670159 | 670160 | Yes | O53772 | Transport |
| 1902 | 890037 | 890038 | CDC1551 | 889115 | 889117 | Yes | Q8VKD9 | Transport |
| 1917 | 1041920 | 1041922 | CDC1551 | 1041467 | 1041468 | Yes | P95302 | Transport |
| 1919 | 1087886 | 1087887 | CDC1551 | 1087460 | 1087462 | Yes | O86319 | Transport |
| 1946 | 1407255 | 1407256 | CDC1551 | 1408505 | 1408507 | Yes | Q11058 | Transport |
| 1964 | 1744186 | 1744191 | CDC1551 | 1760325 | 1760326 | Yes | Q10761 | Transport |
| 1994 | 2116913 | 2116915 | CDC1551 | 2123925 | 2123926 | Yes | O07753 | Transport |
| 2006 | 2184230 | 2184231 | CDC1551 | 2189926 | 2189928 | Yes | P95275 | Transport |
| 2037 | 2540853 | 2540854 | CDC1551 | 2559103 | 2559106 | Yes | Q59570 | Transport |
| 2040 | 2584392 | 2584410 | CDC1551 | 2602641 | 2602642 | Yes | P71879 | Transport |
| 2044 | 2661152 | 2661153 | CDC1551 | 2690410 | 2690420 | Yes | P71748 | Transport |
| 2075 | 3043634 | 3043635 | CDC1551 | 3081806 | 3081808 | Yes | P30234 | Transport |
| 2084 | 3098539 | 3098540 | CDC1551 | 3136179 | 3136181 | Yes | P71617 | Transport |
| 2099 | 3381643 | 3381645 | CDC1551 | 3420887 | 3420888 | Yes | P95097 | Transport |
| 2102 | 3441287 | 3441288 | CDC1551 | 3480536 | 3483302 | Yes | O05793 | Transport |
| 2163 | 3898149 | 3898150 | CDC1551 | 3947715 | 3947717 | Yes | O53563 | Transport |

[0249] TABLE 7
List of Polymorphisms in genes encoding membrane transport proteins

| | BCG | BCG | BCG | Query | Query | Query | Query | | Type of | | Putative |
|---|---|---|---|---|---|---|---|---|---|---|---|
| Polymorphism ID | Position | base | AA | name | Position | base | aa | ORF | SNP | GO ID | Function |
| 632 | 1457413 | G | G | H37Rv | 1459362 | T | V | Yes | NS, C | Q10606 | Lipid |
| | | | | | | | | | | | Metabolism |
| 632 | 1457413 | G | G | CDC1551 | 1458905 | T | V | Yes | NS, C | Q10606 | Lipid |
| | | | | | | | | | | | Metabolism |

Table VII: List of long polymorphisms in genes encoding membrane transport proteins
Polymorphism ID The ID by which the polymorphism can be identified
BCG Start The position in the genome of M. bovis BCG at which multiple polymorhisms start occurring
BCG End The position in the genome of M. bovis BCG at which multiple polymorhisms end
H37Rv Start The position in the genome of M. tuberculosis H37Rv at which multiple polymorhisms start
H37Rv End The position in the genome of M. tuberculosis H37Rv at multiple polymorhisms end
C1551 Start The position in the genome of M. tuberculosis CDC1551 at which multiple polymorhisms start
CDC1551 End The position in the genome of M. tuberculosis CDC1551 at which multiple polymorhisms ends
ORF Indicates whether the polymorphism occurs in an open reading frame (Yes) or not (no)
GO ID The ID for the sequence in the gene ontology database
Putative function The putative function of the gene in which the SNP occurs.

[0250] TABLE 8
List of Polymorphisms in genes implicated in virulence

| Polymorphism | Gene | BCG | BCG | BCG | Query | Query | Query | Query | | is | Is non- | | Putative |
|---|---|---|---|---|---|---|---|---|---|---|---|---|---|
| ID | name | Position | base | AA | Name | position | base | AA | ORF | nsSNP | cons | GO ID | Function |
| 285 | proC | 591914 | C | D | H37Rv | 590761 | G | E | Yes | NS | C | Q11141 | oxidoreductase |
| | | | | | | | | | | | | | activity |
| 285 | proC | 591914 | C | D | CDC1551 | 592131 | G | E | Yes | NS | C | Q11141 | oxidoreductase |
| | | | | | | | | | | | | | activity |
| 1348 | fadD28 | 3239912 | T | I | H37Rv | 3283336 | G | S | Yes | NS | NC | P96290 | calcium ion |
| | | | | | | | | | | | | | binding activity |
| 1348 | fadD28 | 3239912 | T | I | CDC1551 | 3277659 | G | S | Yes | NS | NC | P96290 | calcium ion |
| | | | | | | | | | | | | | binding activity |
| 1349 | fadD28 | 3240065 | G | R | H37Rv | 3283489 | A | Q | Yes | NS | NC | P96290 | calcium ion |
| | | | | | | | | | | | | | binding activity |
| 1349 | fadD28 | 3240065 | G | R | CDC1551 | 3277812 | A | Q | Yes | NS | NC | P96290 | calcium ion |
| | | | | | | | | | | | | | binding activity |
| 1350 | fadD28 | 3240165 | C | G | H37Rv | 3283589 | G | G | Yes | S | Null | Null | Null |
| 1350 | fadD28 | 3240165 | C | G | CDC1551 | 3277912 | G | G | Yes | S | Null | Null | Null |
| 1351 | mmpL7 | 3242680 | A | V | H37Rv | 3286104 | C | V | Yes | S | Null | Null | Null |
| 1351 | mmpL7 | 3242680 | A | V | CDC1551 | 3280427 | C | V | Yes | S | Null | Null | Null |
| 1352 | mmpL7 | 3243139 | T | A | H37Rv | 3286563 | C | A | Yes | S | Null | Null | Null |
| 1352 | mmpL7 | 3243139 | T | A | CDC1551 | 3280886 | C | A | Yes | S | Null | Null | Null |
| 274 | pcaA | 561876 | G | L | H37Rv | 560855 | C | L | Yes | S | Null | Null | Null |
| 274 | pcaA | 561876 | G | L | CDC1551 | 562305 | C | L | Yes | S | Null | Null | Null |
| 275 | pcaA | 562317 | T | A | H37Rv | 561296 | C | A | Yes | S | Null | Null | Null |
| 275 | pcaA | 562317 | T | A | CDC1551 | 562746 | C | A | Yes | S | Null | Null | Null |
| 1561 | dnaE2 | 3736194 | A | S | H37Rv | 3782550 | G | S | Yes | S | Null | Null | Null |
| 1561 | dnaE2 | 3736194 | A | S | CDC1551 | 3774786 | G | S | Yes | S | Null | Null | Null |
| 1562 | dnaE2 | 3736445 | T | R | H37Rv | 3782801 | G | R | Yes | S | Null | Null | Null |
| 1562 | dnaE2 | 3736445 | T | R | CDC1551 | 3775037 | G | R | Yes | S | Null | Null | Null |

Table VIII: List of long polymorphisms in genes implicated in virulence
Polymorphism ID The ID by which the polymorphism can be identified
BCG Start The position in the genome of M. bovis BCG at which multiple polymorhisms start occurring
BCG End The position in the genome of M. bovis BCG at which multiple polymorhisms end
H37Rv Start The position in the genome of M. tuberculosis H37Rv at which multiple polymorhisms start
H37Rv End The position in the genome of M. tuberculosis H37Rv at multiple polymorhisms end
C1551 Start The position in the genome of M. tuberculosis CDC1551 at which multiple polymorhisms start
CDC1551 End The position in the genome of M. tuberculosis CDC1551 at which multiple polymorhisms ends
ORF Indicates whether the polymorphism occurs in an open reading frame (Yes) or not (no)
GO ID The ID for the sequence in the gene ontology database
Putative function The putative function of the gene in which the SNP occurs.

The application's sequence listing, which the Patent Office published only in electronic form, follows.

SEQUENCE LISTING (2351 sequences)

SEQ ID NO: 1 - DNA, 401 bp, Mycobacterium tuberculosis H37Rv
actcggacatcagatccaactcggggtccgcatcgctccgccggcgaccgacgaagccgacgacactaccgtgccgccttccgaaaatcctgctaccacatcgccagacaccacaaccgacaacgacgagattgatgacagcgctgcggcacggggcgataaccagcacagttggccaagttacttcaccgagcgcccgcacaataccgattccgctaccgctggcgtaaccagccttaaccgtcgctacacctttgatacgttcgttatcggcgcctccaaccggttcgcgcacgccgccgccttggcgatcgcagaagcacccgcccgcgcttacaaccccctgttcatctggggcgagtccggtctcggcaagacacacctgctacacgcggcaggca

SEQ ID NO: 2 - DNA, 401 bp, Mycobacterium tuberculosis H37Rv
tcttccacaccttcaacaccttgcacaatgccaacaagcaaatcgtcatctcatctgaccgcccacccaagcagctcgccaccctcgaggaccggctgagaacccgctttgagtgggggctgatcactgacgtacaaccacccgagctggagacccgcatcgccatcttgcgcaagaaagcacagatggaacggctcgcggtccccgacgatgtcctcgaactcatcgccagcagtatcgaacgcaatatccgtgaactcgagggcgcgctgatccgggtcaccgcgttcgcctcattgaacaaaacaccaatcgacaaagcgctggccgagattgtgcttcgcgatctgatcgccgacgccaacaccatgcaaatcagcgcggcgacgatcatggctgcc

SEQ ID NO: 3 - DNA, 401 bp, Mycobacterium tuberculosis H37Rv
tctgccagccaggcccgcggtgccggtgctctccggcgtgttgttgaccggctcggacaacggtctgacgatttccggattcgactacgaggtttccgccgaggcccaggttggcgctgaaattgtttctcctggaagcgttttagtttctggccgattgttgtccgatattacccgggcgttgcctaacaagcccgtagacgttcatgtcgaaggtaaccgggtcgcattgacctgcggtaacgccaggttttcgctaccgacgatgccagtcgaggattatccgacgctgccgacgctgccggaagagaccggattgttgcctgcggaattattcgccgaggcaatcagtcaggtcgctatcgccgccggccgggacgacacgttgcctatgttgaccg

SEQ ID NO: 4 - DNA, 401 bp, Mycobacterium tuberculosis H37Rv
ctaacaagcccgtagacgttcatgtcgaaggtaaccgggtcgcattgacctgcggtaacgccaggttttcgctaccgacgatgccagtcgaggattatccgacgctgccgacgctgccggaagagaccggattgttgcctgcggaattattcgccgaggcaatcagtcaggtcgctatcgccgccggccgggacgacacgttgcctatgttgaccggcatccgggtcgaaatcctcggtgagacggtggttttggccgctaccgacaggtttcgcctggctgttcgagaactgaagtggtcggcgtcgtcgccagatatcgaagcggctgtgctggtcccggccaagacgctggccgaggccgccaaagcgggcatcggcggctctgacgttcgtttgtcg

SEQ ID NO: 5 - DNA, 401 bp, Mycobacterium tuberculosis H37Rv
gagtcaacaaagcgcgattgaatcgatcatcggtccgaagtacacgtgatgtggtcggagtgcttcgagctgtgttgtttgcccctgaggatctggggttggttcgtggggatcccgctgaccggcggcgctatctggatgatctggcgatcgtgcgtaggcctgcgatcgctgcggtacgagccgaatatgagagggtgttgcgccagcggacggcgttattgaagtccgtacctggagcacggtatcggggtgaccggggtgtgtttgacactcttgaggtatgggacagtcgtttggcggagcacggggctgaactggtggccgcccgcatcgatttggtcaaccagttggcaccggaagtgaagaaggcataccagctgttggcgccggaatcgcga

SEQ ID NO: 6 - DNA, 401 bp, Mycobacterium tuberculosis H37Rv
tgcgccgtcgagcgttggcgacggcggccgagtccgccgaacaggtgttggtgactgccgcggtgctcgaggatattcccgccggctgggacgccaggcgggtgcacatcgatgtgcgtgccgatgacaccggatcgatgtcggtggttctgccatgacgggttctgttgaccggcccgaccagaatcgcggtgagcgatcaatgaagtcaccagggttggatttggtcaggcgcaccctggacgaagctcgtgctgctgcccgcgcgcgcggacaagacgccggtcgagggcgggtcgcttccgttgcgtcgggtcgggtggccggacggcgacgaagctggtcgggtccggggcccgacattcgtgatccacaaccgctgggtaaggccgctcgtgagc

SEQ ID NO: 7 - DNA, 401 bp, Mycobacterium tuberculosis H37Rv
gccggcggcaagttcgactcggacgcgtatgcgatatctggtggtctgcacggcgtcggcgtgtcggtggttaacgcgctatccacccggctcgaagtcgagatcaagcgcgacgggtacgagtggtctcaggtttatgagaagtcggaacccctgggcctcaagcaaggggcgccgaccaagaagacggggtcaacggtgcggttctgggccgaccccgctgttttcgaaaccacggaatacgacttcgaaaccgtcgcccgccggctgcaagagatggcgttcctcaacaaggggctgaccatcaacctgaccgacgagagggtgacccaagacgaggtcgtcgacgaagtggtcagcgacgtcgccgaggcgccgaagtcggcaagtgaacgcgcagc

SEQ ID NO: 8 - DNA, 401 bp, Mycobacterium tuberculosis H37Rv
gcgctgacgtcggtggtgaacaagtacgccaaggaccgcaagctactgaaggacaaggaccccaacctcaccggtgacgatatccgggaaggcctggccgctgtgatctcggtgaaggtcagcgaaccgcagttcgagggccagaccaagaccaagttgggcaacaccgaggtcaaatcgtttgtgcagaaggtctgtaacgaacagctgacccactggtttgaagccaaccccaccgacgcgaaagtcgttgtgaacaaggctgtgtcctcggcgcaagcccgtatcgcggcacgtaaggcacgagagttggtgcggcgtaagagcgccaccgacatcggtggattgcccggcaagctggccgattgccgttccacggatccgcgcaagtccgaactgta

SEQ ID NO: 9 - DNA, 401 bp, Mycobacterium tuberculosis H37Rv; identical to SEQ ID NO: 8

SEQ ID NO: 10 - DNA, 401 bp, Mycobacterium tuberculosis H37Rv
gattcccgcggtcgtacctcgctggtgatcaccgagttgccgtatcaggtcaaccacgacaacttcatcacttcgatcgccgaacaggtccgagacggcaagctggccggcatttccaacattgaggaccagtctagcgatcgggtcggtttacgcatcgtcatcgagatcaagcgcgatgcggtggccaaggtggtgatcaataacctttacaagcacacccagctgcagaccagctttggcgccaacatgctagcgatcgtcgacggggtgccgcgcacgctgcggctggaccagctgatccgctattacgttgaccaccaactcgacgtcattgtgcggcgcaccacctaccggctgcgcaaggcaaacgagcgagcccacattctgcgcggcctggt

SEQ ID NO: 11 - DNA, 401 bp, Mycobacterium tuberculosis H37Rv
gtcgatatcgcccgggccggactgatcgagctgctcgacatcgacgagatccaggcccaggcaatcctggacatgcagttgcggcgcctggccgcactggaacgccagcgcatcatcgacgacctggccaaaatcgaggccgagatcgccgatctggaagacatcctggcaaaacccgagcggcagcgtgggatcgtgcgcgacgaactcgccgaaatcgtggacaggcacggcgacgaccggcgtacccggatcatcgcggccgacggagacgtcagcgacgaggatttgatcgcccgcgaggacgtcgttgtcactatcaccgaaacgggatacgccaagcgcaccaagaccgatctgtatcgcagccagaaacgcggcggcaagggcgtgcagggtgc

SEQ ID NO: 12 - DNA, 401 bp, Mycobacterium tuberculosis H37Rv
gggttgaagcaggacgacatcgtcgcgcacttcttcgtgtgctccacccacgatttgatcctgttcttcaccacccagggacgggtttatcgggccaaggcctacgacttgcccgaggcctcccggacggcgcgcgggcagcacgtggccaacctgttagccttccagcccgaggaacgcatcgcccaggtcatccagattcgcggctacaccgacgccccgtacctggtgctggccactcgcaacgggctggtgaaaaagtccaagctgaccgacttcgactccaatcgctcgggcggaatcgtggcggtcaacctgcgcgacaacgacgagctggtcggtgcggtgctgtgttcggccggcgacgacctgctgctggtctcggccaacgggcagtccat

SEQ ID NO: 13 - DNA, 401 bp, Mycobacterium tuberculosis H37Rv
ccagggacgggtttatcgggccaaggcctacgacttgcccgaggcctcccggacggcgcgcgggcagcacgtggccaacctgttagccttccagcccgaggaacgcatcgcccaggtcatccagattcgcggctacaccgacgccccgtacctggtgctggccactcgcaacgggctggtgaaaaagtccaagctgaccgacttcgactccaatcgctcgggcggaatcgtggcggtcaacctgcgcgacaacgacgagctggtcggtgcggtgctgtgttcggccggcgacgacctgctgctggtctcggccaacgggcagtccatcaggttctcggcgaccgacgaggcgctgcggccaatgggtcgtgccacctcgggtgtgcagggcatgcggttca

SEQ ID NO: 14 - DNA, 401 bp, Mycobacterium tuberculosis H37Rv
cgctgttgttgtcggtggcgctgttcttcgtctggatgatcacggtcgcgttcctctacctggtgctcggcggtatgggcgtatgggccaagctcaacagcaacgtcggtgacctgttgaacaacgcgagcggcagcagcgcggaacttgtctccagcggcaccatcttcggcggcgcattcctgatcggcttggtcaacatcgtcctgatgaccgcgcttgccaccatcggtgcgttcgtctacaacctgatcaccgatctgatcggcggcatcgaagtgacgctggcagaccgggactaatgttttgagagtcgggcgccggttgcggtaatctcgtcgctcggccgtacgcgagtacgggcctatagctcaggcggttagagcgcttcgctgataacg

SEQ ID NO: 15 - DNA, 401 bp, Mycobacterium tuberculosis H37Rv
agtcgatcaccatctcctgacccgaagctacgtcggctcgtcgctcgaatacaccttgtggacccgccagggcacgtggcggtacaccgacacgccgttggggccgttcaaccggacgccctcacgccaagtccgctcacctttggccgcgaccggcgtaaccggcagcggtaagcgcatcgagcacctccactgggtcggtgccgagatcccagcgggacaaaatcagcagccccccgctgaccgtttcgatctcgagcaggcgcaccaggcggccgtaacggcgaaactcgtcgattcggatgatcttgatattggaatgtcgtaatagctgcgtccggaaccaacctcggatcgccaggccgtcgggggtaattgccagccttggacgtgcgcgccaa

SEQ ID NO: 16 - DNA, 401 bp, Mycobacterium tuberculosis H37Rv
cgcaccaggcggccgtaacggcgaaactcgtcgattcggatgatcttgatattggaatgtcgtaatagctgcgtccggaaccaacctcggatcgccaggccgtcgggggtaattgccagccttggacgtgcgcgccaagtggcgctcgcaaacaagatcagacccagcgcggcaactccggtcaacacccgcccgggcgtatctgtgactaaggtcacagacgcaatagccatcacgactcccccggctccgcaaccagcgattcccgaggtgcgaggcgcccatgctgtttgctgcatgtattccttagaccctctcaccactgcagacaaagttatccacagacgctatcaacagtggggatgaatcacatgcgtgtgattgagtgaccaaaaggttgc

SEQ ID NO: 17 - DNA, 401 bp, Mycobacterium tuberculosis H37Rv
tgctggccgccacgcatggggtgtcgggcggcaccgagatccgccgcagcgatgcgccgcgactggtcgaccttgtccgtcgggcgcaggcatcggtgaaccgtctcgccaccgaacgcgaagcgctgaccaccagaatcgactcggtgcacggccgatctgtcgataccgcgttggcggccatgcagcggcggtccgccaagctggccggtgtggcggctatgaatccggtccatgggccgggcctggtggttaccctgcaagacgcgcaacgcgacgccaacggccggtttccgcgcgacgcgtccccggacgatctggttgtgcatcagcaagacatcgaggctgtcctcaacgcgttgtggaatgccggtgctgaggcgatccagatgcaggaccag

SEQ ID NO: 18 - DNA, 401 bp, Mycobacterium tuberculosis H37Rv
cggatcctggtcgttgacaactacgacagcttcgtgttcaacctggtgcagtacctcggccagctcggcatcgaggccgaggtgtggcgcaacgacgaccaccggctatccgatgaggccgccgtcgccggccaattcgacggtgtcctgctcagtcccggtccgggtaccccggagcgcgcgggcgcgtcggtgagtatcgtgcacgcgtgtgcggcagcacacacccctttgctgggggtctgccttgggcaccaagccatcggcgttgcgttcggcgccaccgtggaccgtgcgcccgagctattgcacggcaagaccagcagcgtattccacaccaatgtcggtgtgctacaagggcttccggatcccttcacggccactcgataccattcgttgac

SEQ ID NO: 19 - DNA, 401 bp, Mycobacterium tuberculosis H37Rv
tgcgggctgttgtccccgggcgctttgatgacgagcagcacggcgatgatgattgccagcgcccccagcacccccgcggcccagagcagcgcacgctgaccggacgaaaacgtgcgccgcggcggccggtgaccacccgtggccgggcgggatcgacgggatgccgcagtccggccagcagagttggccgcgaccctggctgtcgtacccgacggaatggccgccggggcggcccggccaggggggggtgtctggctgggccgcgggggccggcggccggcgcgcaccgctgccaccgcgtcggcgaacggtcccccactgcgatagcgcatcgcggggttcttcaccagagttatctcgatgagttctcgcacattgggcggcaggtcgggaggcagcgg

SEQ ID NO: 20 - DNA, 401 bp, Mycobacterium tuberculosis H37Rv
gcgcttgcagtcgtgtcgtcatgccgccgcccggcagtcgatgcccggctgaggcgggggtggcggaagtgcggccatcgtcggcgagctggtgacgggccaaggcgtcggcggcgacgcgggcgctgccggggaggcactcgtggggatggcaggagtagttccggtgggggccggcgcggaggtggtgggtgatggagaggctggcgaggaggtgacgtttggttcggttgtctcgctggtggtgggtggggccgggcgcccgggcggggacgtggcacgcggcgccgggcaaggcggcagcagggagttggccgccagttcgcgcaactgcccgatggcgtcatcgagagtgccggccgggagaccggcccgaacctgtgcgcgctccggcggtcgca

SEQ ID NO: 21 - DNA, 401 bp, Mycobacterium tuberculosis H37Rv
tgtccgtagctgatctgcgacagctcgttacgcgggctgaggcagcccatcaggtaaggctggtgcagggacatgcccagtagcgacccttgaatcccccgcatgatggacacgctgccggcgtagtccgctacgtagtagttgctgcggatgatcgcgcgaccaatgagcaggcccgcagtcatcagcacggtcaccagtgcgacaacgaatgctagccgtcggcccgaccaccgtggccgactgaatgtatcggcctgtggcggaacgcgtttaacgatctccttgcgctggctgatggcagaggcccggccggcggcggtgttgggcagggtcagttggtcgtcgtcgcctgagaccgccccggccagaatcggttgggtctggccgtagtcgtagtc

SEQ ID NO: 22 - DNA, 401 bp, Mycobacterium tuberculosis H37Rv
gcagatcgccaccgggctcgtcgtcatcgagatgggccaatgcggcaatcaccaactgggacgccacctcgccggccgcatgcccacccatgccgtcggccagggccaatagccgtgccccagcgtagaccgagtcttcgttgttggcgcgtaccaagccgcgatcgctgcgcgccgcgtatcgcaggaccagggtcacgcgcgccactctcccccgcaagcgggtgggggtaccccccacttgtgggggcgcgcccccaccgcttctctgcgctctgcatcgtcgccagcgcgggtcacgggcgcaactcgattgcagttttgccgatgcgaaccggcgttccgatcggaactcgtaccgcagtcgtcaccttcgccctgtccaggtaagtgccgttggt

SEQ ID NO: 23 - DNA, 401 bp, Mycobacterium tuberculosis H37Rv
cgcgcgccagtcaacgcaccttcggtcaccaccaggtagcgtgcagcgtgccggcgctgacgcgcgcctaagagcgtccctcgcagcgccaggccgcggcgcatcatgaccgcgccggtcggcgcataaatgtcggtcttcaagatccgtagcacggaccagatgaatacccacaacaacatcaagaatccggcacgcgtcagttgcagtaccaacccctgcatctggcgtcctttccgtcctgcaccgtctgctccggccccgcgctgccgagcacgtcagcaaagtcacgatactttgacggtggtcggcgcgggtcaaccccggcagcttcgagcccagtaggttcagtgcatgcggacgatgatctcggagtgtcccaagcggatcacatcaccgtc

SEQ ID NO: 24 - DNA, 401 bp, Mycobacterium tuberculosis H37Rv
ggagctggtaagtgcgtccgctgccgtcgtcgagctgcagcgtaaccgacgttccggcggacccatagccgccctgcccgtaaccgctgtagccaccgggcgctggctgaccgtagtccggagcgcctgattggccgtagtcgtagtctcggccggcgggttcggcgtacccgccaccctgaggagcgtatcccgggacccgcggggattcggtgtagcgggtgtagtcagcgccgccgccatagtcttgccggccgtatgtcgtggcgccttgctggtagccctggtcgtaaccgccttggtcggggtaagccggtcgttgctcgggcgggcccggagggccagagggcacatagctgccctcctcgtggcgagccgggccacgcccgtactccccgtac

SEQ ID NO: 25 - DNA, 401 bp, Mycobacterium tuberculosis H37Rv
catagtcttgccggccgtatgtcgtggcgccttgctggtagccctggtcgtaaccgccttggtcggggtaagccggtcgttgctcgggcgggcccggagggccagagggcacatagctgccctcctcgtggcgagccgggccacgcccgtactccccgtacccgccgtagccgggctggccgccaccgggtgaagggccgtagccgccgctttggcgatagccctggtcgtagccgggagcgccgtagccggcagccgggccgggagaaacaggagggcgttgctcgtagggcggcggatagcccccctgcccttggtcggggtagcctcgaccctggtcctggtacccgcgctggtcggggtagccgcgttgctcggggtaaccgcgttgctcggggtaa

SEQ ID NO: 26 - DNA, 401 bp, Mycobacterium tuberculosis H37Rv
cccgtactccccgtacccgccgtagccgggctggccgccaccgggtgaagggccgtagccgccgctttggcgatagccctggtcgtagccgggagcgccgtagccggcagccgggccgggagaaacaggagggcgttgctcgtagggcggcggatagcccccctgcccttggtcggggtagcctcgaccctggtcctggtacccgcgctggtcggggtagccgcgttgctcggggtaaccgcgttgctcggggtaaccgccctggtcggggtacccgatttgctcggggtagtcgccctggtccgggtggcgcgggcgtgggtagcccggctggggcgggtagccgcccgtctcgggtggataccccccgcgggggtcagatccgccttgcggatccgggc

SEQ ID NO: 27 - DNA, 401 bp, Mycobacterium tuberculosis H37Rv
agccggcagccgggccgggagaaacaggagggcgttgctcgtagggcggcggatagcccccctgcccttggtcggggtagcctcgaccctggtcctggtacccgcgctggtcggggtagccgcgttgctcggggtaaccgcgttgctcggggtaaccgccctggtcggggtacccgatttgctcggggtagtcgccctggtccgggtggcgcgggcgtgggtagcccggctggggcgggtagccgcccgtctcgggtggataccccccgcgggggtcagatccgccttgcggatccgggccaccacgcggatcctcttgcggacgcgcatagcggtcgtcgtaatactcgtcgggacgcccctgcccctgaccgccacggtagctcgaattgtcactcatt

SEQ ID NO: 28 - DNA, 401 bp, Mycobacterium tuberculosis H37Rv
gttcgacgactgctcgaatcggacgaccacatcaccatacgtttgccacccctgttcttggatatagtccgccaagtcccgagcaaaaccggttgacttcagctcaggatcagcgcccaacttctcaaagtcgtgcacaccgagggtaatgatgtattcgttgggcgccaaaaggcgatttccctgcagcgactggatgccgtcggccgcctcgcggcgcagcagggcttcgacctcttgcgggacgatcgagcctccaaagatgcgggcaaacgcatcgccaaccgtctgctcgagtttgcgctcaacgcgctgaaccagccttttctggctacccatctttcagcgctcgcctcactgttctggtgcatcgtcggcgcaaggcaaacgactcgcctgta

SEQ ID NO: 29 - DNA, 401 bp, Mycobacterium tuberculosis H37Rv
cgctgtccggttcagctcggtcgcggccgcagccgggtggcggggcgcctcggtacccttttacacggcgcgcatcgcggtcagcgtcctcgccgcttgttgcgccataccggttatcacgtcggcggctggcaggacggcattgaccaggcccgcggcttgaccggcggtgacattggcgatgctgtagtcacgcgcagcaacggctcgccaatatctggccatggcttcttcgcgatggagaatgtcgagttcggtgtcctcgaattggtcggtgagggcgttgcttagcacgctcatcgtgtgtccttgcggccagggatagcgccgtagctgatcgtagatagtggtgcggcacatgtcgtcgccagtggccgccagcagcgggtcccgcgcctgcg

SEQ ID NO: 30 - DNA, 401 bp, Mycobacterium tuberculosis H37Rv
gccgagtccccctgcgccacttaccgcggcagccagctcaccgccggcgatcaagtccattggcgcggacactatcggatagtcgattccgaacatctggctaaaggccgtcgatagcaccacaacaacctccttggcgagcgtcgtgatgacacgcagatcctggccgatggtaggtgatcaggcgagccacttcttcgccgaactcgcgagccgagcctgatcacgctgggtttggcaactgccgggcttgccgaccgggcatcaagcggccggttgtgggccaacctgtgcgatcggcaggtgcaccacgaccccgggcaccggggtgacctcgagtccttcgttgcgggccagcagagccgcattgtccgggagctgcctggaattgatctcgccgc

SEQ ID NO: 31 - DNA, 401 bp, Mycobacterium tuberculosis H37Rv
gaccgcgtgttgagcacaccggcgctgctgtaggagcgggcaccggcgcaggcattggatccgcgcttgggtggccgaccgctcataggcgcgtgccttagcggcgccgtcgctgccgtcgtcatcggggtacccgaaccatagttccgggtcggttgcgcaggggtgtgccatgtgccggcctccttgttgaacgaaacataggcaaaagcgtatatgtctgtggcgggctctgcaagagaatcgcgataaaaacgtatatacataaggggtggccgcggccgagtcgtatccgggtagtatccggcttatggccggagcgtgcggtgagccgtgagtcggccggcgcggccattcgcgcacttcgcgagtcgcgtgactggtccctcgcggacctggcg

SEQ ID NO: 32 - DNA, 401 bp, Mycobacterium tuberculosis H37Rv
gtcttcggtagctgtcatccaggagcgccaggctttgctggcaaggcaacacgacgccgtggccgaagccgaccgtgagttggccgacgtgctagccagcgcgcatgcggccatgcgggaaagcgtccgtcggctggatgctatcgcggccgaactcgaccgcgcggttccggatcaggatcagcttgccgtcgatacgcccatgggagcgcgtgagtttcaaacgttcctggtcgccaagcagcgcgagatcgtagcggtcgtcgccgccgcccacgagctcgatcgcgcaaaaagcgctgtgctaaagcgcctgcgggcacagtacacggaaccggcccgttagctgcggaccggatacgctggaccggcaggcgttgggtgaattgtcggcgactaca

SEQ ID NO: 33 - DNA, 401 bp, Mycobacterium tuberculosis H37Rv
cccaaacgcgtggcagaccgggttgacaccgaccgaggtgaccgcggtggtcacgtccacgacacgttccgaacagctcgatgccattttgcgtaagatccgccagcggcattcgaacctgtactatccagcaccgcccgatcgggaacaaggagacgccgcccgtgccatcgcggatgcggaagcagctctggcacatcagaattcggctaccgcgcagctcgatctgcaggtcgtctcggcaattctgaacgcgcatctgaagactgtcgagggtggcgaatcgctgcacgagcttcagcaagagatcgaagccgcggtacgcattcgatccgatctggacactccggccggcgcgcgtgatttccagcgtttcttgatcggcaagctcaaggatatcc

SEQ ID NO: 34 - DNA, 401 bp, Mycobacterium tuberculosis H37Rv
ttggtccccggtgtgagcgcgccgggtgggcttccgctctccggcctgctgcgcggcgtgggtgacgaaccggagttgacggacttcgacgaacggggacaagaagtcagggatccggccgattatgagcattccaacgaaccggatgagcgtcgcgccgacgaccgagaaggcgccgacgaggacgccgggctgggcaagtcagaatcgccaccgcaggctccgacgaccgtgacgctgcccaacggtgagacggtgaccgcggccagtccccagctcgccgcggcgatcaaggcggcggccagcggcacaccgatcgcagatgcgttccaacaacagggaattgccatcccgctaccgggaaccgcggtcgccaaccccgtcgaccccgcccggatctc

SEQ ID NO: 35 - DNA, 401 bp, Mycobacterium tuberculosis H37Rv
ccagcggcacaccgatcgcagatgcgttccaacaacagggaattgccatcccgctaccgggaaccgcggtcgccaaccccgtcgaccccgcccggatctcagcgggagacgtaggtgtgttcaccgccacgcccttgcccttggccctagcaaagctcttctggacggccagattcaacacatctcagccgtgcgagggccaaactttctaggctggatacatccagcggcgaccgcgaccgcgccggcgaggaccgaagcaccgacaccaaccaggccggcggccgctcgataggtactgaccgcccggtcacaacaagaggagacagcggatgacagatcgaattcacgtgcagcctgcacatttacgtcaggccgctgcccatcaccagcagaccgcc

SEQ ID NO: 36 - DNA, 401 bp, Mycobacterium tuberculosis H37Rv; identical to SEQ ID NO: 35

SEQ ID NO: 37 - DNA, 401 bp, Mycobacterium tuberculosis H37Rv
cggggcgcaaggcccacagccgggccgtggccaccctgaaagccgatatccaagcctggcacccggctggcatccagaccccgaagccgcgatgcgaatcagatgtgttcgcgcgaatcggtcacacgagccacccatcaactcggaagagccgggtggggccgggagcatccgaggcaccgcttgcctgacataacagcgtaaccgccccgccattgtcgctgtgatggacatgccccagccatttgtcggctagctatacagcgaacgtcaatttttcgtgaatcagcctgaggctattgataattcacggcggcacgtcctactcttagcggcgctatgcgacccaatgcgcgtgcgatgttgcgtttggtgcattgtggtgccggtgctggtgggcc

SEQ ID NO: 38 - DNA, 401 bp, Mycobacterium tuberculosis H37Rv
gccatttgtcggctagctatacagcgaacgtcaatttttcgtgaatcagcctgaggctattgataattcacggcggcacgtcctactcttagcggcgctatgcgacccaatgcgcgtgcgatgttgcgtttggtgcattgtggtgccggtgctggtgggccggcgataacgtcgaaaggtgcggtattgggtgaccgtgttggcgcgttgtcgcagtgccgatcggcggcagcgctgagtcgattcgactttgcaccccgtgactctgttcccaccgccaccttcggtggtggatgcgctttcaggtccaccaataggctagctgttttcgagcggtgtatttgcgtggggggtgaatgtggatacggacaatgacaggcccacgctggcgagggtttacc

SEQ ID NO: 39 - DNA, 401 bp, Mycobacterium tuberculosis H37Rv
gcgcgcatggacgtggtgatgggcacgttcagcaaatcctttgcctccgtcggcgggttcatcgccggagatcggcccgtcgtggactacatccggcacaacggttcaggtcatgtgttttccgccagcctgccgccggccgccgcggctgccacccacgcggctctgcgcgtcagtcggcgtgaacccgaccggcgggctcgggtgctggccgcggccgagtacatggccaccggcctggcacggcagggctatcaggccgagtatcacggaaccgcgatcgtgccggtgatcctgggcaacccgaccgtggcgcatgcgggctatctgcggctgatgcgctccggggtgtatgtgaacccggtggcccccccagccgtgccggaggagcgttcgggatt

SEQ ID NO: 40 - DNA, 401 bp, Mycobacterium tuberculosis H37Rv
ggcctggcacggcagggctatcaggccgagtatcacggaaccgcgatcgtgccggtgatcctgggcaacccgaccgtggcgcatgcgggctatctgcggctgatgcgctccggggtgtatgtgaacccggtggcccccccagccgtgccggaggagcgttcgggattccgcaccagctacctagccgaccaccgacaatctgacctcgaccgggccttgcacgtgtttgccggccttgccgaggacctgaccccgcaaggagccgcgctatgaaagaggccatcaacgccaccatccaacggatcttgcgaaccgaccgcggcatcaccgcgaaccaggtactcgtcgacgacctgggttttgactcgctcaagctgttccagttgatcaccgagctagaa

SEQ ID NO: 41 - DNA, 401 bp, Mycobacterium tuberculosis H37Rv
  dna (1)..(401)
cgtggcgcatgcgggctatctgcggctgatgcgctccggggtgtatgtgaacccggtggcccccccagccgtgccggaggagcgttcgggattccgcaccagctacctagccgaccaccgacaatctgacctcgaccgggccttgcacgtgtttgccggccttgccgaggacctgaccccgcaaggagccgcgctatgaaagaggccatcaacgccaccatccaacggatcttgcgaaccgaccgcggcatcaccgcgaaccaggtactcgtcgacgacctgggttttgactcgctcaagctgttccagttgatcaccgagctagaagacgaattcgacatcgccatctctttccgcgacgcacagaacatcaaaacagtgggagacgtctacaccagcgt

SEQ ID NO: 42 - DNA, 401 bp, Mycobacterium tuberculosis H37Rv
gaaacggccgccagttctgtcgcggcgtcgtcgacgaaaccggccggattggccgcggcggcggtcatcagctcggcgaacccggcctcgtcggtgaccgccgtcagcgccactcgatcggtccacagcaggtggccgatctggtgtgcgatggtccaacccggcgcaggtgtcggatcggcccagcgatccgctggcagatgcgccaccagcgcgtcgaggtcgtcgctttcggcacgcaggtctgccacgaacggcccaggatccgccatcaccacctcctgaggtaacagttcgtcgggaaaggcatgtttgtaccctagcgaccgatcacaggctggccgcggcgcccgacgatggtgtgcaccaccagcccggctaggtagatcgccgacccgaac

SEQ ID NO: 43 - DNA, 401 bp, Mycobacterium tuberculosis H37Rv
cagccccgcctgaaacaacccgtcgccgaactgactcgcaacccgcacctgcagcagacgccagaagtcgggcaagctgcgcaccgaccgccaaacgtcgacgggtgcgcgtgcgtgcatccgggagtgaatcactaaacccacttccaccctgggcacaggcaaggttcggtccaccccgtgccgccccaaccacagtacaaatattcgccgaccctgcttgttcgccccgggcgatgcgacggtggtgcgatgatggtgtggtggcgccgcacgaagaccccgaggaccatgtcgcacccgccgcacaacgggtgcgagcgggcaccttattgttggccaacaccgatctccttgaaccgacatttcgccgcagtgtgatctacatcgtggagcacaac

SEQ ID NO: 44 - DNA, 401 bp, Mycobacterium tuberculosis H37Rv
gccgaccctgcttgttcgccccgggcgatgcgacggtggtgcgatgatggtgtggtggcgccgcacgaagaccccgaggaccatgtcgcacccgccgcacaacgggtgcgagcgggcaccttattgttggccaacaccgatctccttgaaccgacatttcgccgcagtgtgatctacatcgtggagcacaacgacggcggcaccctcggtgtggtcctcaatcggcccagcgaaaccgcggtctacaacgtgttgccgcagtgggccaaactcgcggccaagccaaagacaatgttcatcggtgggccggtgaagcgcgacgcggcgctgtgtctggcggtattgcgggttggcgctgacccggaaggcgtgccgggcctaaggcatgtcgcgggcaggct

SEQ ID NO: 45 - DNA, 401 bp, Mycobacterium tuberculosis H37Rv
cgtactgggcgctctgccacgaccccgcggccagcgtgccgaccgcgcccgcaatgcagacgatcaccaccatcaaggcggtgtgcccgggcgcggccaccgccaccactcccccggcggccagcattactgcggctgccaactgcgtgggcgccatcgcgcgcagcgccagcgccgtggggtcggcagtgggcgtatggcacagcgaccagctcccgaacagggcggacgccgccgccgcacacatgcacagcacacccgcgaggaacattcgttcaccatacgaggccgccgacgaatccgctcaccgagctccatgcgggcccgtgtttctgctcggcctcatcgcgacctagcgcggcgggactggtgtcagggtgcccgcgggcggatacccaggc

SEQ ID NO: 46 - DNA, 401 bp, Mycobacterium tuberculosis H37Rv
gatggtgccgcggtgcctgacgacaagctcttcgtgcaggacatgttcccctacccctcgggtgagggactccacgttggtcatcccctcggctacatcgcgaccgacgtctatgcccgctatttccggatggtgggccgtaatgtgctgcatgcgctagggttcgacgcgttcgggctgcccgccgagcaatacgcggtacaaaccggcacccatccgcgtacccggaccgaagccaacgtcgtcaactttcgccgccagttgggccggctgggcttcggccacgacagccgacgaagcttctcgaccaccgatgtcgacttctacaggtggactcagtggatcttcctacagatatacaacgcgtggttcgacaccacagccaacaaggcgcgcccgat

SEQ ID NO: 47 - DNA, 401 bp, Mycobacterium tuberculosis H37Rv
gatggcatcctggtcaactcggattacctcaatggaatgagcgtgccagcagcaaagcgggccatcgtcgaccggttggagtccgcgggccgcggccgggctcgaatcgaattcaaattgcgcgactggctttttgcgcggcagcggtattggggtgaaccattcccgatcgtctatgacagcgacgggcgtccgcatgcgctcgacgaagctgcactgcccgtcgagctgcctgatgtcccggactactcgccggttttgttcgaccccgacgatgcggacagcgagccttcgcccccactggccaaggcgactgagtgggtacacgtcgacctggacctcggtgatggcctgaagccctacagccgcgacaccaacgtgatgccgcagtgggcgggcag

SEQ ID NO: 48 - DNA, 401 bp, Mycobacterium tuberculosis H37Rv
ccagcgcagcgcgctgatggctcccgcttggacccgctcgacttcaggcagtggaccattgacaccggcctgctcagcgttctcagccagcagggcaaactcgtccagtccggtcagttcgtcgtcagatagcacgcagcggacgttacccgcgtttgactctgcggataccaggcaattgtgcgagtggcccgcgtggtgagcgcagagtcaacgctaaccgatgatgaactcttcgagttgcgcgcgcgcgatgtcgtcgggcagctgctcgggcgggctcttcatcaggtaggccgacgccgggatcaccggtccgccgatgccgcggtccttggcgatcttggccgcccgcaccgcgtcgatgatgacgccggccgagtttggcgagtcccacacct

SEQ ID NO: 49 - DNA, 401 bp, Mycobacterium tuberculosis H37Rv
tcaagacgggtagctgacgtgcttgatggtgccgtcacctgcgaaaacgaggtatccaccgccgtagtcgctagagacatacaacgacaacgacaacgcagccggcgtggtggggtccttgaccggttcgacgatcaggtacatgcttttgacgtcggattgtttgaggccgagggtttccggggcgccgcgcatgatgcccacagcggtcttcgcatcgaatttgctcaggtcaaccacggacacgtcggcaatgctcttggcggaactggtcgcatcgccccagccgccgcggtaggtatacgccaggactcggcggtcgtccgccgggtcgacgcgatcgagcgacgcatactccgggtagatcaccagccggtagcccatggtgtcgccgaaccgct

SEQ ID NO: 50 - DNA, 401 bp, Mycobacterium tuberculosis H37Rv
cccgcccggtaaaccgccgcggggggatcagcttggtggcagacgtcgcccaccggggccgcccgggccccccggttcgtccggacagcctgccggccggctgccccaaccgagggtggacttgccccgggtcggccagatcaactggaaatggatacggcgttcgctgtacctcaccgcggcggtggtgatcctgttgccgatggtcaccttcacgatggcctacctgatcgtcgacgttcccaagccaggtgacatccgtaccaaccaggtctccacgatccttgccagcgacggctcggaaatcgccaaaattgttccgcccgaaggtaatcgggtcgacgtcaacctcagccaggtgccgatgcatgtgcgccaggcggtgattgcggccgaagacc

SEQ ID NO: 51 - DNA, 401 bp, Mycobacterium tuberculosis H37Rv
ctgggaagttgttcggctcggtgaccgccgcagatgtggttgctgccatcaagaaggccggtggaccaaacctcgataagcggatcgttcggctgcccaagacgcacatcaaggccgtgggcacgcattttgtgtcggtgcacctgcacccggaaatcgatgtcgaggtatcgctggacgtcgtggcgcagagctaaggcgagctgaggccacaacagtttgcgcatgccggtggtgaccgcggtcggccgccgccggggtttcgccatgccctgggtgtccaccgcacggtccggtgcggtgatgctggcgaactattcggccggcgtttgcgggcgggtgtcttcaccgggccttaacgtcaggaaaatgtgtctgaaagccaacacgcccggcgcggt

SEQ ID NO: 52 - DNA, 401 bp, Mycobacterium tuberculosis H37Rv
aaagtatgggcgcaagtccgcaaccgactgtccgccaaacagatgatggacatccagctccacgaaccgacgatgtggaagcattccccgagccggtcaaggccgcatcgcgcggaggcgcggatcgaagatcgagcgatccatgagctggcgagaggcgacgcgtactgggacaccgtcgtggagatcaccagcattggagatcaacatgttttcgatgggactgtaagcggcacacacaatttcgtcgccaatggcattagtttgcacaattcgctggaacaagatgccgacgttgtcatcctgctgcatcgacccgacgcctttgaccgcgacgatccacgtgggggagaagcggatttcattctcgccaaacaccgcaacggtccgacgaagacggt

SEQ ID NO: 53 - DNA, 401 bp, Mycobacterium tuberculosis H37Rv
attcgctggaacaagatgccgacgttgtcatcctgctgcatcgacccgacgcctttgaccgcgacgatccacgtgggggagaagcggatttcattctcgccaaacaccgcaacggtccgacgaagacggtcaccgtagcgcatcaactgcacctgtcacgcttcgccaacatggctcggtgacatgcggatgtgtggggtctcacggagcgtggccgaatctcacgaatgatggggccatcagggcggaccggtccacgcatccgcggcggcgttgaagtccccgagcaacacgcgtcgtggttgatgcgtgagatgagtcagatcagggcgacaggacgtcgaaccagtgggactaatgcatgatcaccagatacaagcctgagtcggggtttgtcgccc

SEQ ID NO: 54 - DNA, 401 bp, Mycobacterium tuberculosis H37Rv
gacgttgtcatcctgctgcatcgacccgacgcctttgaccgcgacgatccacgtgggggagaagcggatttcattctcgccaaacaccgcaacggtccgacgaagacggtcaccgtagcgcatcaactgcacctgtcacgcttcgccaacatggctcggtgacatgcggatgtgtggggtctcacggagcgtggccgaatctcacgaatgatggggccatcagggcggaccggtccacgcatccgcggcggcgttgaagtccccgagcaacacgcgtcgtggttgatgcgtgagatgagtcagatcagggcgacaggacgtcgaaccagtgggactaatgcatgatcaccagatacaagcctgagtcggggtttgtcgcccgtagcggtggtcccgaccgg

SEQ ID NO: 55 - DNA, 401 bp, Mycobacterium tuberculosis H37Rv
attttgctcgggtgatgtcatcagctattggttcggtcgcgcggtggatagtccccctcctgggggttgcagccgttgcttccatcggtgttatcgcggacccggtgcgggtcgttcgggccccggcgttgatcctggtcgatgcggcaaacccgctggccggaaagcccttctacgtcgatcccgcctcggcggccatggtcgccgcgcgcaacgccaacccgccgaacgccgagctgacctccgtcgccaacaccccgcagtcctactggctcgaccaggcattcccgccggcgaccgtcggcggcacggttgccaggtacaccggagcggcgcaggcggccggcgccatgccggttctgacgctgtatggaatcccccatcgcgactgcggtagctac

SEQ ID NO: 56 - DNA, 401 bp, Mycobacterium tuberculosis H37Rv
ggtgcggctgttggacccgcatatcctgtcccgaaccttcacccagcaacagcagctcaagaatttctttagcttcgccgagatactcgacatcgatcgctatcgcatcgacggtgagctgcaggactacatcgtcggcgtccgggagctctcgccgaaaagcctcaccggcaatcagaccgactggatcaacaaacacaccgtctacacgcatggcaacggcttcgtggccgccccggccaatcgggtgaacgcggcggcccgcggtgccgagaatatttccgacagcaacagcgggtacccgatatacgccgtcagtgacatcgcgtcgctgggttctgggcgccaggtcatcccggtcgagcagccacgggtctactacggcgaggtgatcgcccagg

SEQ ID NO: 57 - DNA, 401 bp, Mycobacterium tuberculosis H37Rv
ggcaatcagaccgactggatcaacaaacacaccgtctacacgcatggcaacggcttcgtggccgccccggccaatcgggtgaacgcggcggcccgcggtgccgagaatatttccgacagcaacagcgggtacccgatatacgccgtcagtgacatcgcgtcgctgggttctgggcgccaggtcatcccggtcgagcagccacgggtctactacggcgaggtgatcgcccaggccgatccggactacgcgatcgtgggcggagccccggggtccgcgccgcgcgagtatgacaccgacacgtccaagtacacctataccggcgccgggggtgtgtcgatcggaaactggttcaaccgcacggtgtttgccaccaaggtcgcccagcacaagttcctgttctc

SEQ ID NO: 58 - DNA, 401 bp, Mycobacterium tuberculosis H37Rv
gccaggtcatcccggtcgagcagccacgggtctactacggcgaggtgatcgcccaggccgatccggactacgcgatcgtgggcggagccccggggtccgcgccgcgcgagtatgacaccgacacgtccaagtacacctataccggcgccgggggtgtgtcgatcggaaactggttcaaccgcacggtgtttgccaccaaggtcgcccagcacaagttcctgttctcccgggagatcggctcggagtcgaaggtgttgatccatcgcgacccgaaggaacgggtgcaacgcgtggcgccgtggttgaccaccgacgacaacccctatccggtggtggtgaacgggcggatcgtctggatcgtcgacgcctacaccaccttggacacctatccgtacgcacaa

SEQ ID NO: 59 - DNA, 401 bp, Mycobacterium tuberculosis H37Rv
tcgatgccgccgaaacgcccggtggataagccggcattcttagccggtgaactccgctatggctaccattcaagttcgggatttgcccgaagatgtcgccgaaacctatcgacggcgcgccaccgcagcggggcagtcgctgcagacgtatatgcgcaccaagctcatcgaaggggtgcggggccgagacaaggccgaggcaatcgagatcctggaacaggcgctcgccagcactgccagcccaggcatcagccgggagaccatcgaggcatcccggcgggagctcaggggtggatgaatgtgtagtcgacgcggcggccgtggttgacgctctcgccggcaagggcgccagcgcgatcgttctgcgcggtttgctcaaggagtcgatttctaacgcgccg

SEQ ID NO: 60 - DNA, 401 bp, Mycobacterium tuberculosis H37Rv
ccgctcttggccagcagttccatcctcacgttgcgcgcgcggtccagtgtcatcgacttctcgccggcgtagaagtcaccgtgccgcatgtgcgctacgtgggtgcgtgaggccatcgaccactcgcccatgctgtgcgggtgcttgcgcgcgtactccttcaccgccttgggcgcccgacggtccgaattgccttggcgcagtaccgggttcaccgcgctgcccaggcatctggcgtagcgctctttgatggccttctcctggtcagtcttcgggtccgccgggtagtctgggaccgcgtaacccttgtcttgcagttccttgatggcggctaccagctgtggcaccgaggcgctgatgttcggcagcttgatgatgttggtgtcgggtagctgagtcag

SEQ ID NO: 61 - DNA, 401 bp, Mycobacterium tuberculosis H37Rv
tagaagtcaccgtgccgcatgtgcgctacgtgggtgcgtgaggccatcgaccactcgcccatgctgtgcgggtgcttgcgcgcgtactccttcaccgccttgggcgcccgacggtccgaattgccttggcgcagtaccgggttcaccgcgctgcccaggcatctggcgtagcgctctttgatggccttctcctggtcagtcttcgggtccgccgggtagtctgggaccgcgtaacccttgtcttgcagttccttgatggcggctaccagctgtggcaccgaggcgctgatgttcggcagcttgatgatgttggtgtcgggtagctgagtcagccggcccagttcggcgaggttatccggtacccgctgctcctcggtcaggtaatcggggaattccgccag

SEQ ID NO: 62 - DNA, 401 bp, Mycobacterium tuberculosis H37Rv
gttcggcgtcgcgcaggtcgactaggacgaggtgcacatcggtgccgccggttagcaccgcgatgccacgttcggcgacgtcgggctgggtcaaccggccggcaaggatgcgcgcgccgtcgaggcaacgttgttggcgctgcgcgaattcaggttgtgctgccatcttgaatgcggtggccttggctgcgatgacatgctcgagcggcccgccctgctgcccagggaagaccgcggaattgatcttcttggcgatggccgggtcattgcacaagatgatgccgccgcggggcccgccgagcgtcttgtgagtggtggaggtgacgacgtgggcgtgcggcaccgggctggggtgcacgccagcggcgaccaggccggcgaaatgcgccatatccaccatg

SEQ ID NO: 63 - DNA, 401 bp, Mycobacterium tuberculosis H37Rv
ggtcaggcacggtcggtgcgaccgtccctgtctccagagttgcctcggcggtgtggtgcttgggcctgagagattctcggggaggagattgctcctacggcgcctcgacatggaggttctcccacatcgcgtcagcggctgttcgattgtgacggaaagcaacatacacaccacgcatgtgttttgtcaccctgcggtcggtggtagtcggacggcccaatcagacagcgcgggtcatatcacgcgttcgtgcacagttgggtgtttatccacaggggtgcgtttgtcggcggctggcggggcgtggcggcgatagcattcgaatatgagttcgatcacggtgtcggtggacccggtggacccggtggacccggtggacccggtggacccggtggacgccg

SEQ ID NO: 64 - DNA, 401 bp, Mycobacterium tuberculosis H37Rv
gaccgcatcgaccacgcggacctgatggaccgggtgcgtcaccggatcaaagacaagcgggtgttgcggctggtgaactggcagcgcattcggcatcgctggaattggaccgacgtccgccgctggctcaccgaccccaccgggcggtggcaccccatcagcgcggacgggatcaccctgtttaaccccgccgcggtgcccattcggcgataccgctatcggggcaacacgatccccactccctggactcaggctgtctgaaccaccccatcggcagattccgtgaagagccagatacggtgaaagtcgcacgtccggttcgaagggcggccacgggaaacggacccgcagcaacgcgggcaccgcacccatggtcgacccaactgccacgcacccggtga

SEQ ID NO: 65 - DNA, 401 bp, Mycobacterium tuberculosis H37Rv
tcacgcggggggcgatgtaccaccaattcgccgataaagcagcactattccgcgatgtggtggaggtcgtggagcaagacgtgatggcccggatggccaccttggtcgccgcctcgggggcggcgacgccggccgatgcaatccgggcagcggtcgatgcctggctcgaggtatctggtgatccggaggtgcgtcagctgatcctgctggatgcgcccgtcgtgctgggctgggcgggtttccgcgacgtcgcccagcgatacagcctgggcatgaccgaacagttgatcaccgaggcgatccgggccggccagttggctcgtcaaccggtgcggccgctggcccaggtgctcattggcgcgctcgacgaggcggcgatgttcatcgccaccgccgacgac

SEQ ID NO: 66 - DNA, 401 bp, Mycobacterium tuberculosis H37Rv
acggcgttgccgacggtctggcatgagcccgggctcgcggcgcgccagcccgcaaagcgcccgggaggtggtcgagctcgaccgtgacgaggcgatgcggttgctggccagcgttgaccatgggcgtgtggtgttcacccgcgcggcgctgccggcgatccgtccagtcaatcacctcgtggtcgacggtcgggtgatcgggcgcacccgcctgacggccaaggtgtccgttgcggtgcgatcgagcgccgatgccggtgtcgtggtcgcctacgaagccgacgaccttgatccgcggcgtcggacggggtggagtgtggtggtgacgggactggcgaccgaggtcagcgatcccgagcaggttgcccgctaccagcggctgctacacccgtgggtgaaca

SEQ ID NO: 67 - DNA, 401 bp, Mycobacterium tuberculosis H37Rv
cgaccgaggtcagcgatcccgagcaggttgcccgctaccagcggctgctacacccgtgggtgaacatggcgatggacaccgtggtcgcgatcgaacccgagatcgtcaccggcatccgcatcgttgctgactcgcgtacgccgtagccgattggccgcgggcggcccgcacgcatccgcactatctgataaattcttcaactcgtcaaccgatgtaacgctgaagctctcaggagacgcggtggagtccgaaccgctgtacaagctcaaggcggagttcttcaaaacccttgcgcatccggcgcggatcaggattttggagctgctggtcgagcgggaccgttcggtcggtgagttgctgtcctcggacgtcggcctggagtcgtcgaacctgtcccagca

SEQ ID NO: 68 - DNA, 401 bp, Mycobacterium tuberculosis H37Rv
gtgggagctgatggcgatcgcgtcgctgatcctggtgctctccgagcacgcccgcccgcaggtccgctcggcgggcctgtggtacgccgtgatgactcagctgggattcatcgcaatcctggtcgggctggtggtgttggcggcggccgggggttccgaccggttcgccggcctcggggcagtctgcgacggggtccgcgccgccgtatttatgctcacgctggtcgggtttggttcgaaggcgggcctggtgccactgcacgcctggctgccgcgggcccacccggaggcgccgagcccggtgtcggcgttgatgagcgcggcgatggtcaacctgggcatttacggcatcgtccgtttcgatctgcagctgctggggccgggcccacgctggtgggggc

SEQ ID NO: 69 - DNA, 401 bp, Mycobacterium tuberculosis H37Rv
gccgagtcgcgctatatggccgagcggatcacctaccggaccgcggtcgccgacgcgatcgaacagcgcctctatactccggtggtcggggcggtggccgccatggccgagctgctgcgccgtgcccacaccggcagcgtgcaccgctacctggcctacggcgcgctgggcgtactgatcgtgctggtggtcgcgaggtgaacgtgatgtcctacctagcgggcgccgcgcaaatcggcggggtcatggtgggtgcgccgctggtcatcggtatgacgcggcaggtacgggcacgctgggaaggccgggccggcgccggcctgctgcaaccgtggcgtgatctgctcaaacagcttggcaagcaacagatcacaccggcggggacgacgatcgtgttcgcc

SEQ ID NO: 70 - DNA, 401 bp, Mycobacterium tuberculosis H37Rv
gtcgggggcgcagttcgggctgggcggtctgctgcgcgccgatgcgctgacggtggtcatgctcgtcgtcatcgggatcgtcggcacactggccaccgcggcgagcatcggctacatcgacaccgagctggcacacgggcatatcgacggacgtagcgctcggctgtatggggtgctgaccccggcgtttctttgcgcgatggttctggcggtgtgcgccaacaacatcggcgtcatttgggtagcgatcgaggccaccacggtgatcaccgcgtttctggtggggcatcgccgcacccgcaccgcgctggaagcgacctggaaatacgtggtgatctgttcggtcgggatcgccgtcgccttcttgggtaccgtgctgctgtatttcgccgcgcgggatt

SEQ ID NO: 71 - DNA, 401 bp, Mycobacterium tuberculosis H37Rv
ctgtcgcgggcgagacgatcgtgcggctgaaggcgcggctgtggtttgtgcaccgtggcatcgagaaactcttccacggccgccccgccacggccgcggtcgatctcgccgaacgcatcagcggcgacacgtcggcagcgcacgcgctcgcgcacagcctggcgatcgaagacgctctcggcatcgagctgccccacgaggtccaccggctgcgggccctgatcgtcgaactcgaacggctctacaaccacgccgccgacctgggtgccttggccaacgacgtcggctactcgctggccaacgctcacgcccaacgcatccgcgaaaatctgttgcggcgcaatgccgcagtcaccggtcaccggctactgcgcggcgccatccgcgcgggcggggttgcg

SEQ ID NO: 72 - DNA, 401 bp, Mycobacterium tuberculosis H37Rv
cggcctgaagttctacgagatgacgggtttcgcgaagtccaatgcggcgggaatcgaggccacgttggccaagctgagcgatcagtacgcccgcggtagggcatgacgccatgggggcgtgtcggtgtaccgacacgctcgctcacgggttcggttgcaccaagaaaagatgtaccagatcacctgcctgaataggatttttggcccgacgtagcttcgggctagcgcgagcgacgactccgccgtcgagcaggatgtcaccgtggatcaaccgtggaacgccaacatccactacgacgctctgctggatgccatggtgccgctcggtacccagtgcgtgctcgacgtcgggtgcggcgacgggttgctggctgcccggctggctcggcgcataccctacg

SEQ ID NO: 73 - DNA, 401 bp, Mycobacterium tuberculosis H37Rv
gtcgtgaccttcagcatcaatgtcgccgccgttgtctacctgctgatttctaagcggttgttcggtgtgcgcggcgggcgcaaggcttatgacgtcgaacggcgcggcgagcagctgctcgacctcgagcgcgccgcgatgctcacctgaccagccaaaatcccacctgtgcggggcctgcgggttgtgtcaaaggtcaccagcgcctttttcgcactgtttactccggcgcggcgtgcccgtaaagccgcccgggtgaacttggatcaggtggcgcaatgtcgccggaccgacgaaggaccgacgctgtgtcaacactgccaacctgggtcagccagagctctaccgaccgcggcgtggtcgcgccaatcacagcgcgtgcccgcgacgcactgcaggcc

SEQ ID NO: 74 - DNA, 401 bp, Mycobacterium tuberculosis H37Rv
gaggtggcggccagttcggcccgcgttctgctgcgcttgctgccggtgttgacggcctgttgaagacgactatccgccggtgcgttcaccgcgtcaggcggcttcggtgaggtgagtaatttggtcattaacttggtcatgccgccgccgatgttgagcggaggccacaggtcggccggaagtgaggagccacgatgacgacggccgtgaccggtgaacaccacgcgagtgtgcagcggatacaactcagaatcagcgggatgtcgtgctctgcgtgcgcccaccgtgtggaatcgaccctcaacaagctgccgggggttcgggcagctgtgaacttcggcacccgggtggcaaccatcgacaccagcgaggcggtcgacgctgccgcgctgtgccaggcg

SEQ ID NO: 75 - DNA, 401 bp, Mycobacterium tuberculosis H37Rv
ctgggtaaaccatgcgcgacaggcgctgcactcgcccaggtgttcatcgactctcgccgagggcaccggtgcgcgctcgccgtcgagtcgtgccgacagcgcttcgcgcgcgacctcgcagtccatgccatcaatagtcgcgcaatgccgacggattgctccagcgggctcggaccacatcgccgcgggcacacccctgcagccttgcaaaacggttgatgcgtggtggttaaagctcccggccgttgtggcttgtgcgagcacggtggcccgggtggtgcgtgagcgccgtggggctcgcgttcaggggtcaatcgggtttgtcgtcgtcgtcttggttgtggaggaatcgttcggggtggtggaaggtgttggtgcggggttggccgtggtcgaggtgg

SEQ ID NO: 76 - DNA, 401 bp, Mycobacterium tuberculosis H37Rv
gcgttctgatcgccaccaacttcttcgggatcaacaccgttccgatcgcgctcaacgaagccgattatgtccgcatgtggctgcaagccgccgacaccatggccgcctaccaggccgtcgccgatgcggccacggtggccgtaccgtccacccaaccggcgccaccgatccgcgcgcccggcggcgatgccgcagatacccggctagacgtattgagttcaattggtcagctcatccgggatatcttggatttcattgccaacccgtacaagtattttctggagtttttcgagcaattcggcttcagcccggccgtaacggtcgtccttgcccttgttgccctgcagctgtacgactttctttggtatccctattacgcctcgtacggcctgctcctgctt

SEQ ID NO: 77 - DNA, 401 bp, Mycobacterium tuberculosis H37Rv
cccccggctggactgcttcctatcgccgcagcgctcggtcccggcgaccaatggggcgcaaacttggctgtggctgtcacgccggccacggcggccgtgcccggcggaagcccgcccaccagcaaccccgcgcccgccgctcccagctcgaactcggttggcagcgcttcggctgcacccggcatcagctatgccgtgcccggcctggcgccacccggggttagctctggccctaaagccggcaccaaatcacctgacaccgccgccgacacccttgcaaccgcgggcgcagcacgaccgggcctcgcccgagcccaccgaagaaagcgcagcgaaagcggcgtcgggatacgcggttaccgcgacgaatttttggacgcgaccgccacggtggacgccgc

SEQ ID NO: 78 - DNA, 401 bp, Mycobacterium tuberculosis H37Rv
tgcaaacaacgcacgccatgctgcgttcgctatttcgggtcggcctcgatccgcgcaacgtcgcggtgatcggcaagtgctattccactcacccgggagttgtcgacgcgatgcgggccgacggcatctatgtcgacgattgcagcgacgcctacgcaccccacgaatcattcgacacccagtacacccgccacgtagaacggtttttcgccgaatcctgggcgcggcttacggccgggcgtacggctcgtgtcgtgctcctcgacgacggcggatcgctgctagccgtcgccggcgccatgctcgatgcgagcgccgacgtgatcggaatcgagcagacgtccgccggctacgccaaaatcgtcggttgtgcgctggggtttcccgtcatcaacatcgcc

SEQ ID NO: 79 - DNA, 401 bp, Mycobacterium tuberculosis H37Rv
tggcgttgttggcggccgcggtgttgtatgcgtcggtcgcggtcgccgacgaaatgtcatccgatcatccgcatctcgggctgatcgaccagggcgacatcgtggcatcgtttctgaacatcgacgtcccgctccaagctctcagccggctaccgttgctttcgatcgatgggtatcgccgccttcaggtgcgctccggctataccttgttccgccaaggtgagcgggccgaccacttctttgtcatcgaatccggcgagcttgaggcgctcgtcgacgggaaggtcatccttagactcggtgccggagaccacttcggcgaggcgtgtttgctcggtggcatgcggcgcatagcgacggtgcgggcatgtgagccatcggtcctgtgggagctcgacggc

SEQ ID NO: 80 - DNA, 401 bp, Mycobacterium tuberculosis H37Rv
ggcgtgtttgctcggtggcatgcggcgcatagcgacggtgcgggcatgtgagccatcggtcctgtgggagctcgacggcaaggctttcggcgacgcgctgcatggggacgctgcaatgcgtgagatcgcctacggtgtcgctcgcacccggctcatgcacgccggcgcgtccgagtccttgatggtgtaacggtcttgcactcgtgggctgtcggcggatcacgggatcgttatgccggttcttgcgagtgacataggttgacatacgtataaccggtccctgcggtcgaacacggcttgacaattggacgaatctcgttgcgcgccatcagttgtgctcacaggatcgccgccgttcggagcgatgagcccgcttggcgcgcgaagtgcgccggggcgga

SEQ ID NO: 81 - DNA, 401 bp, Mycobacterium tuberculosis H37Rv
ggcccacatgctgcggccctcgaccagcgcgtcgagcagcacgcccaggtcatcgtcggtcagcacgatatcggcggccccacgggcggcagaggaaccgcgcccgctcactccgatgcccacgtcggccatccggatggccgcggcgtcgttggcgccgtcgccgaccatcgcggtcactcgcccgcagcgctgcagcgccgccacaatctgaaccttttgttccgggctgacccgagcaaagacttgcatgtcggcggcgagtttggcatgcgcctcctcgtccaggacggcaagttcggcaccggtcacgactcgcgcgtccgccggtagtcccagctggcgggcgatcgcccgggcggtgatcggatggtcgccggtgatcagcaccacgttgcgct

SEQ ID NO: 82 - DNA, 401 bp, Mycobacterium tuberculosis H37Rv
aaagacttgcatgtcggcggcgagtttggcatgcgcctcctcgtccaggacggcaagttcggcaccggtcacgactcgcgcgtccgccggtagtcccagctggcgggcgatcgcccgggcggtgatcggatggtcgccggtgatcagcaccacgttgcgctcggcgtccagcaaggcttcgatcaacggacgcgaggaagaccgggccgtatccgccaatccgacatagccgatcagctcgagatcgtgcgcgacggcgtcgacagcgtcggcgtcggtctcgtcatcatgggtggtcccgttgtcccaggtgcgctgcgcgactgccagaacacgcaggccctgctcggcgaggtggcgtaccacggattcggcatgttcgtggtcgacgcccgggtcgg

SEQ ID NO: 83 - DNA, 401 bp, Mycobacterium tuberculosis H37Rv
gcgtgcgcgtgcccttccccgttatggggctgcgtggacgcgcgcgcggcggcccgcagcacctcggcggagggcgcatcggtggtctgcggcaacggatcccgttcggctgcggtgctgctcggtagcgcgcataccacccgcaggcggttctcggtgagtgtgccggtcttgtcgaaacatatggtgtcgacacggcccagcgcctcgatggtgcgaggcgagcgcaccagcgccccacgtgccgtcaggcgctgggcggcggcaagctgggagagggtggccaccaacggtagaccctccgggaccgcggccaccgcgatggcgacgccgtcggccaccgcttgccgcagcgacgcccggcgcagcaacgccagagctgtcaccgcggcgccgccggc

SEQ ID NO: 84 - DNA, 401 bp, Mycobacterium tuberculosis H37Rv
gggcgacccagccggtgaccgtggcacccatcgctaccagatccattgccgcagcggtcaacggcaccaggatcgccaaggggttacctgggtcggcgaatggtgccgagttcggcgacgacaccgacccagccaggaatatgtcggcagccaccgcggaaaccacatcacgtacctcgtccacggcgatgtcgctatccgcatcaggttcaagttcgaccaccagccgacccaatgagccctcaacgtgggcctcggccacgcccgggatcctgcggactggctcctccaccatggcggcatgctcgtgccagcgagggaatggcagtagcggatccaggtcgaaatgcacgcgccgtccgctgcgccaacgcaccggcggtgtcattccgtcaggcgat

SEQ ID NO: 85 - DNA, 401 bp, Mycobacterium tuberculosis H37Rv
accaggatcgccaaggggttacctgggtcggcgaatggtgccgagttcggcgacgacaccgacccagccaggaatatgtcggcagccaccgcggaaaccacatcacgtacctcgtccacggcgatgtcgctatccgcatcaggttcaagttcgaccaccagccgacccaatgagccctcaacgtgggcctcggccacgcccgggatcctgcggactggctcctccaccatggcggcatgctcgtgccagcgagggaatggcagtagcggatccaggtcgaaatgcacgcgccgtccgctgcgccaacgcaccggcggtgtcattccgtcaggcgattcgttgtgggaaccgcgtaccccgattgcgcgaccagtcgtttgcaccaccgactgcaccaccgg

SEQ ID NO: 86 - DNA, 401 bp, Mycobacterium tuberculosis H37Rv
gctgactacaatgtgggaggttcgatcgcctacgagatgggcgacgttctcaaacaagtaatcgcggcttgtaaacgtgacgatatcgtgccggaagtcgaccccgcccttcttcggcccaccgacgaaaagatcatctacggagattgcagcaagctggcggccataacaggctggcaacaagaaatctgtttgactcagacgattgccgacatgttcgattattggcgtagcaaatccgagtccgccctgatggtgtgaccgaatgtctttgtcctgccaacctgaggagcagataagattgaccgtaacggactctcagtatcgacaaaaggtgtgcaccgcgagaactgctgaggagatctttgtagagacaatcgctgtcaagacacgcatcctca

SEQ ID NO: 87 - DNA, 401 bp, Mycobacterium tuberculosis H37Rv
acatcgttgtcgtgacaaaccagcagggcgtgggtgccggattgatgagcgccgtcgacgtgatggtgatacatcggcacctccaaatgcagcttgcatccgatggcgtgctgatagatggatttcaggtttgcccgcaccaccgttcgcagcggtgtggctgccgtaagccgagaccgggtctggtcctcgactggctcggacgacaccccgacagtgagccattgctgagcatcgtggttggggacagcctcagcgatcttgaattggcacacaacgtcgccgctgctgccggtgcatgtgccagtgtccagatagggggcgccagttctggcggtgtcgctgacgcgtcatttgactcgctctgggagttcgctgtcgcagtcggacatgcgcggggg

SEQ ID NO: 88 - DNA, 401 bp, Mycobacterium tuberculosis H37Rv
acccgtaaggcgtggagttgctgatgccgtggcttcagcgctcggaaacgctggaatcttgctgtgtgctggctgtgtccttgcgacgagccactcgacttggcgcgtaccggtttgacgatcggggagcccagtgcaagcatgagaccccgcaagcaccgggcgctgacgcctcttcgtgaggtgactgagacgacacctccgtgtgtcctggccgtgaggaggtgagggcgagatgagtccgagcgacagtcccgatccgacattcgtcttgtcccgatctggctccggcattctttctgccttctgagctttcgcgagttactgcgcatgtccgatgtggcgcagttgtggcgttctgaatgacgcacgctgatcgggcttcctgcaggagaagaaca

SEQ ID NO: 89 - DNA, 401 bp, Mycobacterium tuberculosis H37Rv
tagtagccaattcagccgagcgccaaccagcagcaccacgtcggcgcgggccatcgccagcgaacgagccgcagccgccgactgcgggtgtgagtcgggcagcagccccttggccatcgacatcggcaggaagggaatgccggtgtgctccacaaactcccgaataacgttgtcggcctgcgcatatgccgcgcccttgctgagcacgagcagcggtcgctgcgcttgggcgagcacgtccagcgcgcgatcaatcgcctccggtgccggcagtagtcggggagccgggtccaccggccgccaaatggcgccggaagcagccgatgcctcaacggcctggcccagcacatcgccggggatatcgaggtatacaccgccgggccgcccggaggtcgcggtgc

SEQ ID NO: 90 - DNA, 401 bp, Mycobacterium tuberculosis H37Rv
acctcggccttgatcaccgtgcggtcgtgccccgcggtctcggtgccgagcactcggccacgacgactggacaggtcgcccaacaccgcgccgacgaaatcgtcgggtaccagcaccgaaatctcatcgattggctcgagcaagatcaccttcgtcgcggccgcggcctcccgcaatgcgagcgcgccggccatttggaaggcgaaatcggaagagtcgacgctgtgggctttgccgtcgagcaacgtgacccggatatcgaccaccgggtagccggcgtgcactcccttatccatctgtgcgcggacacctttctccacattggggataaactgccgcggcaccgccccgccaaccactttgtcgaggaactcgaacccggagccctccggcagcggctc

SEQ ID NO: 91 - DNA, 401 bp, Mycobacterium tuberculosis H37Rv
agaccttgtcgccgaaggcgtcttgtgccgcggtcagcgcttcccggtagttcgcccgggcgtggtccagcttggtgatgaccaccgcgcggggcatgccgacctggctgcattcctgccacagggacttggtcggttcgtcgacgccctcgttggccgcgatcacgaacagtgcgcaatcggcggcccgcaacccggcccgcagctcacccacgaagtcggcgtacccaggggtgtcgacgaggttgaccttgatgccgtcgtaagccagcgaggcgaccgcaaggcccaccgagcgctgttgccggatctccgcctcgtcgaagtcgcagaccgtggtgccctcggtgaccgagcccggcctggacaacaccttggccgccaccaggagagcctcgatg

SEQ ID NO: 92 - DNA, 401 bp, Mycobacterium tuberculosis H37Rv
ccccgagggccccaccagaaccacgttgcgaacgccgccgggcccgtttgcggtgggagcggcggccgcgccctgggaagcattcactctgtcggccatggctttcctccagttctccggggtcggttcccgtggtgtggcccagcaggacgtagtaggcaacttttctcccaactgccgcccagcacaagggtcgggtcaggtgagtagtaggcaatcggagccgtcgttgtggtcaggcgtgccagctggcccagcgctggactgctattgcgattaccgggccgttcaacggaaccgattggtattgagcatatttggcgcgcagcaggcggtatgcggcgcgcatcacctcgccatcgcgatgaatcgcggcgaccccgtcggcccggacccaccac

SEQ ID NO: 93 - DNA, 401 bp, Mycobacterium tuberculosis H37Rv
catcagcagttcgtgcagacgcttgccggtggcgctggagcatatgcggccgccgaggcccaggtcgagcagcagctgctggccgcgatcaacgcgcccacccaggcgctgctggggcgccccttgatcggcaacggtgccgatggggcgccggggactgggcaggccggcggggctggggggatcttgtacggcaatggcggcaatggcggctccggggcggctgggcaggccgggggtgccggcgggccggccgggctgatcggccatggcgggtccggcggggccggcggctccggcgcggccggcggggccggcgggcacggcggatggctgtggggcaacggcggcgtcggcggatccggcggggcgggtgtcggcgcaggcgtggctggcggtca

SEQ ID NO: 94 - DNA, 401 bp, Mycobacterium tuberculosis H37Rv
ccgacgttgcgcacgatctcgatgcccggggtgtcggccgggacgatgaacagcgacatcttctcgtacgtacgggcttccggcttggtgacggccatgacgataaagaacgacgcatgcttggcgttggtggaaaaccacttctcgccgttgatgatccagtccccgtttcccgcggcatcgcgggtcgccgcggtcacgaacagcccgggatcggaaccaccctgcggctcggtcatcgaatagcaggaggtgatctcgccgtcgagcagcggtcgtagatagcgggctttctgctcgtcggtgccgaacagcgccaggatctcggcgttgccggagtccggcgcctgacagccgaacgccgacggcgcccaccgggagcggccgatgatctcgttgag

SEQ ID NO: 95 - DNA, 401 bp, Mycobacterium tuberculosis H37Rv
gctcgcggcgacaaagatcggcggcggcatcgccggcgtgtcgtagagcttgagctcgtcggtccgaaaatagtggcccgtgaacgagatccgctcaccgctccacagctggcggatcagtacgatggcctcgatcagccggtcgtggcgctcgcggtagttgccgaacgtgtcggtggcggcttgttcgttgagccgctcgccggtgcccagccccagaaacacccgtccggggttcaggatcgccagcgaggcaaacgcctgagcgacggtggccggatggtagcggtatatgggacaggtcaccccggtgccgaacaagatgctgctggtgctgttgcccaccaacgccagggtcagccagggaaacatcgaatggccctcgttgtcttgccatggct

SEQ ID NO: 96 - DNA, 401 bp, Mycobacterium tuberculosis H37Rv
accgaacgtccgccgtgagatgccggtcatcgggctgcactacccgcgtcgcgctgcagcacaccttcgagagtgcatcctgactcaccgtcggcgccaccggttagcctggcgagatgaccccgcaggcacgcccagcgcgcagggccgatgtccgcgagctgtcccgcaccatggcccgggcgttctatgacgatccggtcatgagctggttactgtcgaacgacaacgcccgcaccgcaaggctgacccggttgttcgcgacgattgtccgccaccagcatctggccggcggtggtgtggaagtggcccgcggcgcggcgggcatcggcggggcggcgctgtgggatcccccggatcgatggcgggagtcgcgccgccagcaactggcgatgacaccg

SEQ ID NO: 97 - DNA, 401 bp, Mycobacterium tuberculosis H37Rv
tcgcgttcatcatgatgttgcgccatcccgagaaggtgaccgggtttttcggcgtgaacaccgtggcaccctgggtgaagcgcgatcttggcatgctccgcaatatgtggcggttctggtatcagatccccatgtcgctgccggtgatcggcccgcgggtgatcagcgatcctaagggccgctacttccggctgttgaccgggtgggtcgggggcggatttcgggttcccgatgacgacgtgcgcctgtacttggactgcatgcgcgagccggggcacgccgaggccggatcgcggtggtatcgcacctttcagaccagggaaatgctgcgctggctgcgcggcgagtacaacgacgctcgggtcgatgtcccggtccgatggctgcacggcaccggagat

SEQ ID NO: 98 - DNA, 401 bp, Mycobacterium tuberculosis H37Rv
gaaggtgaccgggtttttcggcgtgaacaccgtggcaccctgggtgaagcgcgatcttggcatgctccgcaatatgtggcggttctggtatcagatccccatgtcgctgccggtgatcggcccgcgggtgatcagcgatcctaagggccgctacttccggctgttgaccgggtgggtcgggggcggatttcgggttcccgatgacgacgtgcgcctgtacttggactgcatgcgcgagccggggcacgccgaggccggatcgcggtggtatcgcacctttcagaccagggaaatgctgcgctggctgcgcggcgagtacaacgacgctcgggtcgatgtcccggtccgatggctgcacggcaccggagatccggtgatcacgcccgacctgctggacggct

SEQ ID NO: 99 - DNA, 401 bp, Mycobacterium tuberculosis H37Rv
cgactgggattgctgggtgcagcactacacccccgacgtcgaatacatcgagcacgcggcgggcatcatgcgaggccgccagcgggtacgtgcctggattcaagaaacgatgacgaccttcccgggcagtcacatggtggccttcccgtcgctgtggtcggtgatcgacgagtccaccgggcgaattatctgcgaattggacaaccccatgctcgaccccggcgacggcagcgtgatcagcgcgacgaacatttcgatcatcacctatgccggcaatggccagtggtgccgtcaagaagacatctacaacccgttgcggttcctgcgggcggcgatgaagtggtgtcgcaaggcgcaggagttgggcaccctcgacgaggacgcggcgcgttggatgcgcc

SEQ ID NO: 100 - DNA, 401 bp, Mycobacterium tuberculosis H37Rv
gcacgacgcaggtctgcccgccgtcgcgatgtgtgtgtcgacaacctacggcggcggcgactggggccgcaccccacacggcgccttcatcgcgggcgcggtgttcggcaggctgcctttcacgatgcgcggcatccggctggaggcggtgggtgtcgacgatgctgcgagggcgctgatcttggcggccgaacgcgggcgcaacggcgaacggtacctcatctccgaacgcatgatgccgttgcaagaagtggtgcggatcgccgcggatgaggccggtgtcccgccgccacgatggtcgatctcggtgccggtgctttacgccctgggtgcgttgggcagtttgcgagcccgactcacgggcaaagataccgaactcagcctggcgtcggtgcgcatga

SEQ ID NO: 101 - DNA, 401 bp, Mycobacterium tuberculosis H37Rv
gaaaccggtggacccgcggtggccgccctccccaacgggagtgggaatctgatagtccgcgaggtagccgagcagaaactcgctggtgtatttcagcgcgaggtagaagacgacggcgcccaggccggcaatgacaccgatcgtgatgcctagcaggaaccatttgcgcaggtagcccgcgctcctgatcgatacgccgaatcgtccgccggcggcctcgttcccgatgtcttccgcctccggcatggtcgggaggttagcagcatgccaagcgaacaccgaccagtcgcccggcgccatcccagagttggccagcgctatccgacgatcagcagcgcaaccatggcccaggtctggacgtacgcgatcaccgccgctgtgcggcgaggagatccgaaacg

SEQ ID NO: 102 - DNA, 401 bp, Mycobacterium tuberculosis H37Rv
caaacccacgaactcgtcattgtggccggcatcgaacgggcacgccgcgagccgaccttgatggggcggctggcggtcgtcgttgacttcgcgatggaggccgatgcccagtatcccgcctcgaccgcgttcctggccaccaccgtgctcgaatcccagcggcatccagaattgagtcggaccgaaaacgatgcggtgcgagcaacccgagaattcctggtttgggctgtcaatgatgcgatcgaacgcggtgaactagccgccgacgtcgatgtctcttcgttggccgagacgctgttggtcgtgttgtgtggcgtgggcttctatatcggttttgtcgggagctatcagcggatggcgaccatcaccgattcgttccagcagctgttggccggcacgct

SEQ ID NO: 103 - DNA, 401 bp, Mycobacterium tuberculosis H37Rv
aggactggcccgccgcgctgcgtgatgccgggtttgacccgacggcacgcacggcgtggttggccgaggggctgttgatgtacctaccggccgaggcccaggaccggctgttcacccaggtcggcgccgtgagcgtggcgggcagccggatcgcggccgagactgcgccggtgcacggcgaagagcggcgagcagaaatgcgggcacggttcaagaaagtggccgatgtgctcggtatcgagcagaccatcgacgtgcaggaactggtctaccacgaccaggatcgggcgtccgttgccgactggctcaccgatcacggttggcgggcccgatcccaacgtgcgcccgacgagatgcgccgcgtgggtcgctgggttgagggggtgccgatggcggacgac

SEQ ID NO: 104 - DNA, 401 bp, Mycobacterium tuberculosis H37Rv
cagcgtggcaagggccgtggacacttcgtccgcggcagccgccgccaggccggttgtcggggccgcgacggccgccgtagcctggttgatcgccgagccgatcccggccaaatcggtagccgccgctgccaataccgacggctgcgcgaatacgtacgacaaaccccatccctccttgtcgacggggcccataacccacccgtcgagccgatacgttgagcgtaaagcgactccgcggttgtgtctggcctttggagtgaacccaaatggggccatgctgcctcgtcattggcgaggtcggtaaacggtagtcggtggacgtcgatgccgtcgggaatccgttaggtgacgaggccctcgatgtttcgaacggtgtccgaggccgccgcgaggagggtgag

SEQ ID NO: 105 - DNA, 401 bp, Mycobacterium tuberculosis H37Rv
cgaccacgaagccggtgcgatccttacccgcgaagcagtgggtgagcaccgggcgtccggcggcaagcagtgtgacgacacgatgtagcgcgcgctgtgctccattgcgcgttgggaattggcgatactcgtcggtcatgtagcgggtggccgcgtcatttatcgactggctggattcgccggactcgccgttggacccgtcattggttagcagcctcttgaatgcggtttcgtgcggcgctgagtcgtcggcgtcatcatcggcgaggtcggggaacggcagcaggtggacgtcgatgccgtccggaacccgtcctggaccgcggcgggcaacctcccgggacgaccgcaggtcggcaacgtcggtgatccccagccggcgcagcgttgcccggccggcg

SEQ ID NO: 106 - DNA, 401 bp, Mycobacterium tuberculosis H37Rv
gacagtcgtcaagcacgacgtcaccattgccgcaccgctgaacctgccggccacgatgcccgagcacgccagcgagctctacagcaagaacatcaccgcgctactcgacttgttgatcaaagacggcaggctggccccggacttcgacgacgaggtgattgcccagtcgtgtgtcacccgcgggaaggactcctagatgtacaacgaattgttggagaacctggcgatcctggtgctgtccggattcgtcgggttcgcggtgatctcgaaagtgcccaacacgttgcacaccccgctgatgtcaggaaccaacgccatccacggcattgtcgttctcggcgcgctggtggttttcggcgaaattgagcacccatcgctcgtgttgcaggtcatcctgttcg

SEQ ID NO: 107 - DNA, 401 bp, Mycobacterium tuberculosis H37Rv
cacggcattggcaacctcggccgcggtgaaggggtacgcgttgtgcacccatctgatgcccatgaaggcgttgaggtccgacaagatattgagcgggtactgcgggttgtgggcgtagccgtcgtattggccggtgtacatgtaggtctggtagggggaatccggtggagtcgcaccgttgaacgacatatccaagaacgggaggtaaaggcccacgtaacgctcgaggacgccgccgttggggttattgatattaccgatcaacgtgaaagccagccggcttggatctggggcttggcccggtggtaacgccataagagcgcgtatttcattggtcgctaccgcggcgctttgcgagtagccgaaaacgacgacgtcatgcccattttgtagttccgcgt

SEQ ID NO: 108 - DNA, 401 bp, Mycobacterium tuberculosis H37Rv
cgggatgtagaagccggggaagcgcgccagcagcccgccgacgggattgttgccactaccaatcatgacgaaggagatatcgtccggattcggcgaacccatcgccatcagcgaattgatgtagttgttgatgatcgtggcgctctgcgagtagccgaacgcaacgaccttgttgtcgagggccagttggttgttgacggcggtattcagcagcgccacgccttcggtgacggactggttgaacgtcagattgccgaggtcgggggtaaccggccagaactgctcgggcgtgaacaggccttgcgagacagcacccgggaagagggtctggatgaaagccttgttgatgtctgtcacgtactcggggtcgggtagcgggttattggtgccgcccataatca

SEQ ID NO: 109 - DNA, 401 bp, Mycobacterium tuberculosis H37Rv
gggcgtgaacaggccttgcgagacagcacccgggaagagggtctggatgaaagccttgttgatgtctgtcacgtactcggggtcgggtagcgggttattggtgccgcccataatcaacgccgttatcggactctccgcagccagctgcgcgatcgccggcagcccgccggccccgctggatccgttggggctcaacggcgcacggcccaacagcgtccggatcggtgcgttgatagtgtccagcgcgtgcgatacccgggccgcattggccgcttcggcgtgtgcgtaggcgttgccggcggcctccaacgtccgggtgaactcgctgtggaacgccgcggcctgcttgacgaccgcctgatactcccgcccgtatgcgctgaacagggccgccgttgccg

SEQ ID NO: 110 - DNA, 401 bp, Mycobacterium tuberculosis H37Rv
gcctcatcgccgaatgcggcggtaacgtcagttcagaacatggggtgggcagccgcaagcgtgcctacctgggaatgtcccggcaggccaacgacgtcgccgcgatgcggagggtcaaggcggcgttggacccgaccgggtaccttaacgccgcggtcttgttcgactgaccggtgctgcgcaagcattcagcgcctttagagatcaccggtgaaactgatgagctgacgcaccgcgatgccatcggcgaggtggtccatcgcctcgttgatatcgtccaaccgaatcgttgacgtcaccagcgactccaccggcagacggcccgattgccacaacgacacgaagcggggaatgtcgtggctgggcaccgccgaacccagatagctgccgatcagtgaccg

SEQ ID NO: 111 - DNA, 401 bp, Mycobacterium tuberculosis H37Rv
cctaaggcgccgggttgcggcgctggcgggcgcattgagcggtcgcggggtcggtttcggcgatcgggtcatgatcctgatgcttaaccgcaccgagttcgtcgagtcggtgctggccgccaacatgatcggggccatcgccgtaccactgaatttccggctcaccccaaccgaaatcgccgtcctggtcgaagactgtgtcgcacacgtgatgctgaccgaagctgcgctggctccggtggccatcggtgtccgcaacatccagcccttgctgagcgtgatcgtggtcgccggcggatccagccaggacagcgtgttcggctatgaggacctactcaacgaggccggggatgtccacgaaccggtggacatcccgaacgactcgccggccttgatcatgt

SEQ ID NO: 112 - DNA, 401 bp, Mycobacterium tuberculosis H37Rv
acgtgatgctgaccgaagctgcgctggctccggtggccatcggtgtccgcaacatccagcccttgctgagcgtgatcgtggtcgccggcggatccagccaggacagcgtgttcggctatgaggacctactcaacgaggccggggatgtccacgaaccggtggacatcccgaacgactcgccggccttgatcatgtacacctcgggcaccaccggccgcccgaagggcgccgtgctgactcacgcgaacctcaccggtcaggcgatgaccgcgctctacaccagtggcgccaatatcaacagcgacgtcggtttcgtcggcgtcccgctgttccatatcgccggaatcggcaacatgctgaccgggctgctgctcggcttgcccacggtgatctatccgctg

SEQ ID NO: 113 - DNA, 401 bp, Mycobacterium tuberculosis H37Rv
gcaatccagggcttcgcgtcgctgggcaacatcggtgtcgaggcgttcaccgggttcttcgccgcactgatcaacgtgcgcatcgccggcccagttgtcacgggtgtcgccctggcggccacggtcggtgcgggtgctacggccgagctgggcgcgatgcggatcagcgaggagatcgatgccctggaagtgatgggcatcaagtcgatctcgtttctggcctccacccggatcatggccgggctggtggtgatcatcccgctgtacgcgttggcgatgattatgtcgttcctgtccccgcagatcaccaccacggtgctctacgggcagtcgaacggcacctacgagcattactttcaaacgttcctgcgtcccgacgatgtcttttggtccttcttgga

SEQ ID NO: 114 - DNA, 401 bp, Mycobacterium tuberculosis H37Rv
aagcggaactggattcggcgctgttggcggcggccgggttcggcaacaccacagccgatgtcttcgaccgcggcgggccgtatctgcagcggggggtcgccgacctggtccccaccgccaccctgctcgacacttatagcccggaactgttctgcacgatccgcaacttctacgatgccgatccgctcgctaaagcggcgtccggtggcggtaacggctactcgctgaggacgaactcagagatcctatccgggataggtatctccttgttgtctcccctggcgttagccaccaatggggcggcaatcggaatcggactggtagccggattgatagcgccgcccctcgcggtggccgcaaatctagcgggagccctacccggaatcgttggcggcgcgccc

SEQ ID NO: 115 - DNA, 401 bp, Mycobacterium tuberculosis H37Rv
gcccggaactgttctgcacgatccgcaacttctacgatgccgatccgctcgctaaagcggcgtccggtggcggtaacggctactcgctgaggacgaactcagagatcctatccgggataggtatctccttgttgtctcccctggcgttagccaccaatggggcggcaatcggaatcggactggtagccggattgatagcgccgcccctcgcggtggccgcaaatctagcgggagccctacccggaatcgttggcggcgcgcccaatccctatacctatccggagaatctgccgcgggtgaacgctcgcggtggcccggggggcgcccccggttgctggcagccgatcacccgggatctgtggccagcgccgtatctggtgatggacaccggtgccagcctc

SEQ ID NO: 116 - DNA, 401 bp, Mycobacterium tuberculosis H37Rv
gggtgagggcaagggggccaacgatctgctgccgccaggtggactcatcccattgtcccgcacgtcaccggccttggatctggacgcgttgatcggtggtttcaagccggtgtttcgggcgttggatcccgcgaaggtgaacaacatcgccaacgcgctcatcaccgtcttccaggggcaaggtggcaccataaacgacatcctcgaccagaccgcgcaactgaccagccagatcgcggagcgcgatcaggcgatcggtgaggttgtcaagaacctgaacatcgtgctggacaccacggtcaagcatcgaaaagagttcgacgagacggtcaataacttggagaatctgatcactgggctgaggaaccactccgaccagttggccggcggcctcgcgcaca

SEQ ID NO: 117 - DNA, 401 bp, Mycobacterium tuberculosis H37Rv
gcatccggctgggacatcgagacggtcaagcggtcgctgaatgtgttgtcggagaccgttgatcagacctatccgcacctgagcgccgccctcgacggggtggctaagttctccgacaccatcggcaagcgcgacgagcagatcacgcacctactagcccaggccaaccaggtggccagcatcctgggtgatcgcagtgagcaggtcgaccgcctattggtcaacgctaagaccctgatcgccgcgttcaacgagcgcggccgcgcggtcgacgccctgctggggaacatctccgctttctcggcccaggtgcaaaaccttatcaacgacaacccgaacctgaaccatgtgctcgagcagctgcgcatcctcaccgacctgttggtcgaccgcaaggagga

SEQ ID NO: 118 - DNA, 401 bp, Mycobacterium tuberculosis H37Rv
ccccaggatgcccagctgcaagtccggggggcgcgcaacattccctgtgtcgatgtcctgggcaaacgagcggcgacgccgaaggagtgccgcagtaaggacccgtacgttccgctgggtaccaacccgtggtttggtgatccgaaccagattctcacctgcccggcacctggagcgcgctgcgatcagccggtgaagcccgggttggtgattccggcgccctcgatcaacaccggtttgaatccggcgcccgccgatcaggtgcaaggaacgcccccgccggtcagtgacccgttgcaaagaccgggttcgggtactgtgcagtgcaacgggcagcagcctaacccgtgcgtctacactccaacatcgggcccgtcggcggtctatagcccggccagcgg

SEQ ID NO: 119 - DNA, 401 bp, Mycobacterium tuberculosis H37Rv
caggatgcccagctgcaagtccggggggcgcgcaacattccctgtgtcgatgtcctgggcaaacgagcggcgacgccgaaggagtgccgcagtaaggacccgtacgttccgctgggtaccaacccgtggtttggtgatccgaaccagattctcacctgcccggcacctggagcgcgctgcgatcagccggtgaagcccgggttggtgattccggcgccctcgatcaacaccggtttgaatccggcgcccgccgatcaggtgcaaggaacgcccccgccggtcagtgacccgttgcaaagaccgggttcgggtactgtgcagtgcaacgggcagcagcctaacccgtgcgtctacactccaacatcgggcccgtcggcggtctatagcccggccagcggtga

SEQ ID NO: 120 - DNA, 401 bp, Mycobacterium tuberculosis H37Rv
ggttggcgcgtccttgtccgcgggtgttgtccacgtaggcgcccagcggtgagctgcagccggtcgaccgccagctgccccccttttgtccgcgaacgtcgaagaagttggcgttgaccgcaatggtgggtcgccccatacgctgccacgccttaagcggcgggtagatctcggaggcttgccacaagccttcaccggtgcgagcacctgggttgtgttcgcagcgcgcctggtctccagtgtgggtgtctaccagtagatgtggtgaaagccgttgggaggcattcttgatgatcatcagatggccgccgttgttcatctcgtaccagtgaccacctgcgttgagcagcggcataggatgaccgccgccgaagttgtacaccaggtatgagcccctggtg

SEQ ID NO: 121 - DNA, 401 bp, Mycobacterium tuberculosis H37Rv
tcctcgttcaccaacgcgattgggaaatgccgcaaattggtcatggggtttaggatgccgcccagatagagcgcggccagcgccgacatcagggccaacgtggtggcgatcggtgccatccagaaacgcaccgtccgaatcgctttgacgttccgcttggggttgggtgcggcggggcgcggctgcgcttgagacatgcgggctcctgtctgtcgtggccactctatgttgccgaatcgcccagcttcgcgtgcatctcccagatcagtacttccgacggctcattggcggtcaggccgcgggcgtcagcgtcggtgaaccgcaccgcgtccccgtcggcaagctcgccgccaccttccagagtgaggcggccgtaggcgacgaacagatgcaggaagggt

SEQ ID NO: 122 - DNA, 401 bp, Mycobacterium tuberculosis H37Rv
gccggcctggaccaagagtgcggtgcgcagatcgatgcagtgctgtggcagtcggaagcattcaccgaccgcctgcgtgccgcctacgccgacggcaatctacccaaggggcgcctgtcggacatggtacggcggatcctgcggtcgatgtttgccgtcggaatcgaccgatggaaaccagcgccggcgccggacatgaatgcgcacaacgagattgccgcacagatggcgcggcaaggaatcgtgctgctgcaaaaccgagggctgctgccgctcgctcccgaatcggccgggcgtattgccgtcatcggcggctatgcacacctcggtgtgccagccggttacggttcgagcgccgtcaccccgccggggggctatgcgggcgtgataccgatcggtgg

SEQ ID NO: 123 - DNA, 401 bp, Mycobacterium tuberculosis H37Rv
taccgttgtggtgcttgagacgggcaacccggtgaccatgccctggcgcgactcggtgaacgccatcatgcaggcctggtatccgggccaggcgggtggccaggccgttgcggagattgtgaccgggcaggtgaatccttcgggccggctgccgatcaccttcccggtcgatctcggtcagacgccacgctcgcaaccgcccgagctcggtgccccgtgggggacatcgaccacgatccactacaccgagggcgccgatgttggttaccgctggtttgccagcacaaatcagaccccgatgttcgcgttcggtcacggcttgtcctataccagtttcgagtatcgtgacctggtggtgacgggcggccacaccgtgcacgccagtttcagcgttaccaaca

SEQ ID NO: 124 - DNA, 401 bp, Mycobacterium tuberculosis H37Rv
aaatcgctgctggtaagactcgtcgggtacacccctagtcaacagctcgctcaaggagacatccgaactgtcctcgacatcgctgaccatccgccctggattgtcggcgacgcggtggaaaaccagaatgatgcagctgcgagcacttccggaggcggtgcggaagcggtgatgcaccagcgagccagcggcgaatacaccgctcagcggtcgctcggaatcggtcacctcgatcaccgttgggtggtcctgaccgcccagctggcgctgcgcgtcgaacaccttgcggatgctgtcgggggtggtgaagatcgatgcattttcactcgaccacggcaccccgtcctcgttgacgaagcaggtgcgggcgagtttatgggtgccgggtaggaaggtgaaat

SEQ ID NO: 125 - DNA, 401 bp, Mycobacterium tuberculosis H37Rv
tcccgttagttcaaccaccgggtgatcggcgcactgaacgagaaaggatatggcgaatgcgcacgaattgctggtggcggttgtccggctatgtcatgcggcatcggcgcgatctgctgttgggattcggggcggcgctggccggcaccgtcatcgccgttttggttccgctggtaaccaagcgtgtcatagacgacgcgatcgcggccgaccacagaccgctggcgccctgggccgtggttctggtcgccgccgccggggcgacctacttgctgatgtacgtacgccggtactacggcggtcgaattgcccacctggtacagcatgacctgcgcatggacgcctttcaggccctgttgcggtgggacggccgacaacaggaccggtggagcagcggccag

SEQ ID NO: 126 - DNA, 401 bp, Mycobacterium tuberculosis H37Rv
gccgcttgcgctgcttgcggtgctgctggtacccgtgattggcctgatcgcccaccgcagccgccggctgctggccgcagccacccactgtgcccaggaacacaaggccgcggtcaccggagtcgtcgatgcggcggtctgcggaatccgggtcgtcaaggcgttcgggcaggaggagcgggagacggtcaagctggtgacggcatcccgcgcgctctatgctgcccagctgcgggtggccaggctcaacgcacacttcggtccgctgctgcaaaccctgcccgcgttgggtcagatggcggtcttcgcgctcggcggatggatggccgcgcagggcagcattacggtgggcacctttgttgccttctgggcctgcctgacattgctggcgcggccggcat

SEQ ID NO: 127 - DNA, 401 bp, Mycobacterium tuberculosis H37Rv
cggatggatggccgcgcagggcagcattacggtgggcacctttgttgccttctgggcctgcctgacattgctggcgcggccggcatgcgatctggcggggatgctgaccattgcccagcaggcgcgcgccggcgcggtgcgggtactcgaactcatcgacagccggccgacgctggttgacggcaccaagccgctgtcgccggaggctcggttatcactggagttccagcgggtgtccttcggatatgtggctgaccgccccgtgctccgcgagataagcctgtcggtccgggccggggagaccctggcggtggtcggtgcgccgggcagcggcaaatccacgttggcgtcgctggcgacgcgttgctacgacgtcacacagggcgcggtgcggatcggtg

SEQ ID NO: 128 - DNA, 401 bp, Mycobacterium tuberculosis H37Rv
cccgacgaggtgtgggagcgctgtccccgctatcgggaattgctgtcgcccgcgccggatctcgccgatgacctggttgtcgcggagcgctcgccggtgtgtcgaccggtggccgggctcggcaccaaggccgcgcagcacaccaacgtccacaaccccgggcctcacgatcacccacccggccccgacccgttacgccgcctgctgcgtgagttccgcggcccgcttgcgttgagcctgctgttggtggccgtgcagacctgcgcgggtctgctgccgcccctgctcatccgccacggtattgacgtcgggattcgccgccatgtgctctcggcgctttggtgggcagcgctcgccggcaccgccaccgtggtcattaggtgggtcgtgcagtgggggag

SEQ ID NO: 129 - DNA, 401 bp, Mycobacterium tuberculosis H37Rv
acggcttgagcacgcaccaagtggcggtgcagctcaactattgcgagcgcacgatcaagaacatcgttcatgacatagtgacgcggctgaagctccgcaaccgcacgcatgccgtcgcacatgcgctgcgcgcgggcctcatttgattgatggccggcgtccgacgtacgtgcggccgggccgatcccaagcgagtggtgtaacgtgcacggtagccattatgtatagcaacatacatatgcctcggatggagcggcgatgcaaggtccacgcgaacggatggtggtctcggccgcgctgttgattcgggaacggggagcccacgccaccgccatctcggatgtgctgcagcacagcggcgcaccgcgggggtcggcctatcactacttcccgggcggtcg

SEQ ID NO: 130 - DNA, 401 bp, Mycobacterium tuberculosis H37Rv
caactgctatgcgaggccgtcgattacgccggagagcatgtcgccgccatgatcaacgaggccgaggggggcctggagctgctggacgcgctgattgacaagtatcgccagcagctgctcagcaccgactttcgcgccggctgcccgatcgccgcggtctcggtggaggcgggcgacgaacaagatcgcgagcggatggccccggtgatcgcgcgtgcagcggcggtgtttgaccgctggtcggacttgactgcccagcggttcattgccgacggcataccgccggatcgggcgcacgagctggcggtgttggcgacgtcgacgctcgagggcgcaatcttgctggctcgggtgcggcgcgacctgacgccgctggatctggttcaccgccagctgcgcaa

SEQ ID NO: 131 - DNA, 401 bp, Mycobacterium tuberculosis H37Rv
aagctgctgtggatcctgaccggcaacttcgcgaaaaagggtggccaacacctgcattcgtcgttcgctccgctgttcagccaggtctccggccgcacaccggtcaccggtgcgcctattatcgcgggcctgatcccgggcaacgtggtgcccgaggagatcctgaccgagcacccggatcggtttcgggcgatgatcgtagagaggggcaatccggctcactcgctggccgattcagccgcctgccgggcggcattccaggcgctggaactgatggtggtcgtcgatgtcgccatgaccgagacggccaggctcgcccactacgtgctgccggcggcgtcgcagttcgagaagccggaagccacattcttcaatttcgagtttccacgcaacggctttca

SEQ ID NO: 132 - DNA, 401 bp, Mycobacterium tuberculosis H37Rv; identical to SEQ ID NO: 131

SEQ ID NO: 133 - DNA, 401 bp, Mycobacterium tuberculosis H37Rv; identical to SEQ ID NO: 131

SEQ ID NO: 134 - DNA, 401 bp, Mycobacterium tuberculosis H37Rv
ggccctgctggccaagggcattggctacgcgctgatcacggtcggtttgctaatcgcggtgaaccaacttgaggcccatttactgcagccgctggtgatgggtcgggcggtgtcgattcacccgctggccgtggtgctggccattgccgctggcggtgtgcttgccggagtcgtcggcgccctgttggccgtcccgacggtcgctttcttcaacaatgcggtgcaggtgctgctgggcgggaatccgttcgccgacgtggcagacgtttcttccgatcacctcaccgaggtttaaaggcgtccttcgcggcgaagcagatcctgggcggacagggcgccgccgccgcggcggcgctgacgcgtcttatcgctcgtgccgcgggcattcagctgctcagtgg

SEQ ID NO: 135 - DNA, 401 bp, Mycobacterium tuberculosis H37Rv
ggggtgatcgcgcgcagctcggtgagcttcttcgacgcgtcagccgggttgatcaacccgttctgcaggacgcgcaccgatggatctttagatgcgcctaccgcgtaggcacgctcttgccacatattcgccggatcgttgtccggctcgatgaatccgccgatcgccatcgccttgctgcggatgtcagcgatctgcgcgtcggtgaccggttgatggttgctggtctggatcaccagtgtcagcggattggtgcggtatccggggaagagtttgtcgaactcctcctgcgcctggcgcaccgaattggtcggcggcaagtacttctcgctgatcccgcccaatgacagcttgcccaccgggataatcagcaaaatcatgatgatgacgatcggtgcggc

SEQ ID NO: 136 - DNA, 401 bp, Mycobacterium tuberculosis H37Rv
attggtgcggtatccggggaagagtttgtcgaactcctcctgcgcctggcgcaccgaattggtcggcggcaagtacttctcgctgatcccgcccaatgacagcttgcccaccgggataatcagcaaaatcatgatgatgacgatcggtgcggcgaacagcactgggcgcttcatcacccggttaaccagcttgccccagaagccggcttcgacctcttcgcgggtcttggtccgctgcaggcggtcggcgagccagttcaggtaggcggccgaaatcttccagttcgccaggaagggcacccggaacagggtccgcacgccgagcgcgtcgacgtgtttgcccaggatccccagacaggccggcaacacggtgatagacaggatggccgacagcatcaccg

SEQ ID NO: 137 - DNA, 401 bp, Mycobacterium tuberculosis H37Rv
catcgccgccacccggcgcccggtggtggcggtgttgaacaaggccgatctggccggcccgctctcgggtgcaggtccgatcgtgatggcgcaggcccggtgcgcgcaattttctacactcctcggggtccccatggagtccatgatcgggttgctcgccgtcgcggcgctcgacgatcttgatgacaccttgcgggccgtgctgcgggcgctagccgcccaccccgacggctttgacgctctcgaccgagccgttgcggggtttctggcggcagccctgccggtccctaccgaggtacggttgcggttgctggacaccctcgacctgttcggcatcgcactgggcatggcagcgttccggccgggccggccctcgcgaaccccggcgcagctccgcaccc

SEQ ID NO: 138 - DNA, 401 bp, Mycobacterium tuberculosis H37Rv
tcgagacgctgctgagcaccgcgattagtgaacgcgacgacgccgagaacgcccgggtggccgatcaggtcagcatcattgacggcgaactgcgcgaacacgccgtcgctgcggcgcgggccgcggccctgcgtgaccgggagatgccggcggtgcgggccgcacttgaggcggtgcgtgcagaactcggcgagccgggtgcgcccacaacaggcctgttctgaagcttctgaatcgttgttgtgagcaggcttatacccgcccaagtcttccctgacaagttctgggcgataatctggataaaaagtgtctcactaggtgagcggccgtatcagcctcgccaccaagacgggcatacctaacccatacgtaaccgcgagcacccgataactacgcaggag

SEQ ID NO: 139 - DNA, 401 bp, Mycobacterium tuberculosis H37Rv
cgaacacgccgtcgctgcggcgcgggccgcggccctgcgtgaccgggagatgccggcggtgcgggccgcacttgaggcggtgcgtgcagaactcggcgagccgggtgcgcccacaacaggcctgttctgaagcttctgaatcgttgttgtgagcaggcttatacccgcccaagtcttccctgacaagttctgggcgataatctggataaaaagtgtctcactaggtgagcggccgtatcagcctcgccaccaagacgggcatacctaacccatacgtaaccgcgagcacccgataactacgcaggagaattcgatgacctcagcgaccatccccggtctggataccgcgccgacgaatcaccaggggttgctgtcctgggtcgaagaggtcgccgagctca

SEQ ID NO: 140 - DNA, 401 bp, Mycobacterium tuberculosis H37Rv
tacagccacggatctccaagcttgagtccgtcaacgtacgacagcccgtcttgacggacgcctggaggattgaccagaagagttgccacgtggagaactttacaaacgatttcggctggtgatgggcggaattgcgccctgcggctctggtcgccgggccgcgacgtaccctcggcgcatgcagattcgcccgtatatcggcgccgataagcccgccgtcatcctgtatccgtccgggacggtcatcagcttcgacgagttggaggcccgcgccaaccggttggcgcattggttccgccaggctggtctgcgcgaggacgacgtcgtggccatcctgatggagaacaacgagcacgtgcacgcggtcatgtgggcggctcgccgcagcgggttgtactacg

SEQ ID NO: 141 - DNA, 401 bp, Mycobacterium tuberculosis H37Rv
ccgtagatgccgatgtgtttcatctgctcgatccacgcctccgggtagctattggcatgctcgacctcacggacggttggcttcacgtctcggtcgatgaatgcccgcacggtggcgaccagcatcgcttcgtcgtcgttgagctcgttgcgcaccttttgtcgccctccgtattgaccccctgtccgatagcctgccagcatgtggcgttgtggctagcgggtatgggggcatccgcgtcggcgggccctatttcgatgacctgtcaaaaggtcaggtgttcgactgggcgccgggggtcacactgtcgctggggctggcggccgcccatcagtcgatcgtgggtaaccggctacgcctggctctggactccgacctgtgtgcggcggtgacgggtatgc

SEQ ID NO: 142 - DNA, 401 bp, Mycobacterium tuberculosis H37Rv
ttcggcataggccagatcctcgtcgtggagcaggtcgtgggtgccgacgccgatccatgccggcgccagccctcctaggtcgtcacgccgtcccgggaccgcgacccgtgcgtccgcatcgccaagatatgcccgccagccgaaccggttggcgcgcccgttccatagccggtagtgcgggttggcgggggcgatcgacggccggtcgtcgagcatggggtacaccagcaactgaaatgccggtgtgatgccgccacggtcgcgggcaagcagagccagcgccgccgcgaggccgccgccggcactagcgccgccgattgccacccgcgcggggtccaccgccggcaggctggccagccaggtcaacgccgagtagcagtcgcccagggcggcaggatacg

SEQ ID NO: 143 - DNA, 401 bp, Mycobacterium tuberculosis H37Rv
ggtggtcggccgtgcgcacctggagcggcgtgccgctggccgagctggcgctgctggcgggcgtgccggcggcgcgctcggcacgggttacatcgctgcagcgcggcggggcgttcggcgaggcgaagctggcggcaaaccagatcgccgaccccgatgcgctgctggcgttgcgggtcgacggggcggatctgtcgctggatcatggctacccggcccgcatcatcgttcccgcactgcccggtgtgcacaacacgaaatgggtcgctggcatcgaattccacaagaggtgaaatgttcgacattgcaacgcgtttcaaaaactcctacgggtcaggtccattgcacctgctggcgatggtgtctggcttcgccctgctgggctacatcgtggccaccgc

SEQ ID NO: 144 - DNA, 401 bp, Mycobacterium tuberculosis H37Rv
ataaagaagccgttgtccaagccctcgggacggccgccgccgcacaccaaccgagcgccctcctcgatgcccttggcgatgtagccttcaacgcgagtccgctgcttctccgagatcagcggcccgatctgagctgccgggtccgacggcgggcccaccgggagagccgttacgaaattagttaccgcagccacgatttcgtcgtaccgggagcgcggagccagaatgcgggtctggttgacgcagccctgtccggcgttcatgacgccggagaacaccatcatcggaatagctgcggccaggtcgacgtcctcgagaatgatggccgccgacttgccgccgagttctaaggtgcacggcttgagcatctcagcggcacgcctgccgacctctcggccgac

SEQ ID NO: 145 - DNA, 401 bp, Mycobacterium tuberculosis H37Rv
ccctcccggcactaccgacaacaccccctcgggcaggcccacctcggcgaacacctccgccaaagcgtttgcggtcagcggtgtttcggcggcgggcttgagcacgatggtgcagccggccagcagcgccggcgcaatcttgttgacggccagaaacagcgggacgttccaggccacgatcgcgcccaccacaccgaccggctcacggctgacaatgctctgtccataggagccggtgcgggtttcggtccaggtgaccttgtccgctgcaccggcaaagtagttcatcgcccccatcgaacccatccagtgcatcgtctcgatgatggtcggcggctggccggtttcggctgcgagcagcttggtgaacaggtccttgcgctcagccagcatcttgaccg

SEQ ID NO: 146 - DNA, 401 bp, Mycobacterium tuberculosis H37Rv
cgggcggcggcgcgggcgccgccgaggtagtggctgaggcccatctcgtgcccgccgaatggccccagccaaaccgtgtaggacagcacgaccaacccgcctggcttggtcacccgcagcatctcggtgccaagctgccaggggcgcggcacgtgttcggcgacattggaggacaagcagatgtctaccgagtcgtcggcgaacggcagtgccatgcctgacgcccggacgaacatgccgggccggccggtgaacgcaggtccggcggcatgcatttcatcagggtccggctcgacgccgatgtagccgacaccggcgtcggagaacgccgtcgcgaaataccccggcccgccgccaacgtcgagcagcgtacggccaactggcggctcgctatgtgtggc

SEQ ID NO: 147 - DNA, 401 bp, Mycobacterium tuberculosis H37Rv
tggacactgcatcgcgcagcagtaggtatccgggccgcagtagcggcgcggccaacagcagcaccaagaccagcgcgtaccccggtcggaaccagcgcacgtcgcctgattagcgccgctcgggcgggccggggtcgggatgccccgcgtccggcggtgggggcggctgcgccgaaccgagtcggggcggatccgagccactcggctcgcgcgggaagtcggggcgctgcgtgggcagtttctcggtctcagcctccgctccaggcaccggttcttcgaagccgccgcggcggtaatcgtggtcgtcccgatccccgctggcagccatcagcgcaccttcggtccgaaggctaaacgacgcgaacagaccaccgccgaccagcgcgaccaagccggccgcg

SEQ ID NO: 148 - DNA, 401 bp, Mycobacterium tuberculosis H37Rv
cgccggagcgaggatccgacctgaagtgtgaccacgtcggcgttggcgggcgattcgacggtgacttgctgttgggacaccagcggcacgtcctggttgaccacgatgtgctcggtggctagcgacgccgagtcgagtgccgttccagtgccgtcgctgatcaacgtggcatcgatatcgagtgggatctcagcgatcctgctggtggtataggtcgacagcagcagggcggcgatcagtagggcggctccgagtccgatagcgccgcacgcggcgaaccgcaacatgactgcccggttcacctgcgccgctctcccccgcaagcgggtggtgcccccacctcatcgcttcgtcccccgcaagcgggcggtgcccccactgcatcgtcgccggcgcggttc

SEQ ID NO: 149 - DNA, 401 bp, Mycobacterium tuberculosis H37Rv
cacccgcgaaccggtccgtatctgcgatcgcgggtggcgcgcatcatgccggcctatgtggtggcggtggtcgtcatcctgtccctgctgcccgacgcggatcatgccagcctgaccgtgtggctggccaacctgacgctcacccagatctatgtgccgctgaccctgaccggcggcctgacccagatgtggagcctgtccgtggaggtcgccttctatgcggcgctgccggtcttagcgttgctgggccgccgaattccggtcggtgcccgagtgccggcgatcgcggcgctggcggcgctcagctgggcgtggggctggctcccgttggacgccgggtcggggatcaacccgttgacctggccgccggcgttcttctcgtggttcgccgcgggaatgtt

SEQ ID NO: 150 - DNA, 401 bp, Mycobacterium tuberculosis H37Rv
caggcgtcgtgtgatagcaccatcttgtcggcatggccgcgctcgcacattcgggccacgatgttcacccggtcctgaaacggtgagatcacgtcgacgccgaaccggtccatcccgaggtaggagccggcggcgatgagctcttccaggtagccgacgtcggtgctgtcgccgcagtgtccgataaccacccggctcaggtccaccccctcctcggcgaagatgcgttgctggtcaaggccgcgccgcagcccggcgtgggtgtgggtggagatcggcgccccggtgcgtttgtgtgcttgggcgaccgcgcgcaacacccgctcgacaccaggggtgaggccgggttcgtcggtggcgcacttgaggattcccgccttgatgccggtgtcggcgatgcc

SEQ ID NO: 151 - DNA, 401 bp, Mycobacterium tuberculosis H37Rv
catgcgaatggtccgtcggccggtgcacgatcccgcccgctacgaccagatctggaaggaccacgtgctcgcgctcaacggcgcatatcaaatggcaccatagtgcgccgcgtcgagatcgacgctgccgtgttgcccactcgcactttcgcgcgctggtgtcaatctcgacgccagccttgaccgtgatgcagcgcacagtagaatgaccagtggtcaccaacgcaaggaggccccatgccgacggtgacgtgggcgcgtgtcgatccggctcgccgtgccgccgtggtggaagccgccgaggctgagttcggtgcgcacggattctcccgcggcagcttgaacgtcatagcccggcgtgccggagtcgccaagggcagcctgttccagtacttcgcgga

SEQ ID NO: 152 - DNA, 401 bp, Mycobacterium tuberculosis H37Rv
atcgtcccagtccagcaggctgaccgacaccgtgtcggtcacccggggatgcagccatagcgtcgttagctcgccgacctgcagttgtcggacctgggggccgtcgcccaggttgatggccaccaccgtcggatgggccggcaacatcgaccggctggcggccagccgcagcccggtcaccacggtgggccgcggcagggtcagcgtcagcgtcggcggggttttgtgttgcaccacccgctgcggcgcggtccaggcggtggccggatcgccgtcggcggccgcgtacgccgagccgaggatgtcgacaaggtcggaatcaccgctggcccgggtggtggaaggcgcggcgatcaagtcggccagcttcgggccctgccgtggtcgcacccacaccatcg

SEQ ID NO: 153 - DNA, 401 bp, Mycobacterium tuberculosis H37Rv
ctgcagcggctcgtcgtggctggtgccccacacctgggtggcgaacggggcgcccgggaccaccagcacccgcccgggagtgggcgtcgcggcatggtgtgtgcgcagccagtcggcggcctcctgccagtactggggaagcgcaccgaacgtgccgggcggggcgacccggccggtccacgccagcgaggtgctgaccatcagcgcggtcagggctaccaccgccaccgctactcgcttgtcccgctcggggtgcgcgaacgcgcgcagccacgccggcctcggcgcgctgcctggcagcggaactcggctcagcagctgcgccaagcccagcaccaggggcagccggatcacaggccccaccttgtgtacgttgcgcaggggggtgccggcggcgtcca

SEQ ID NO: 154 - DNA, 401 bp, Mycobacterium tuberculosis H37Rv
gtgacaagctggcccagctgctggtggtcggcgtgcgagatgctgcggacgcccaagccgtggtcaccaactaccacgtcggcggcatcctcatcggcagcgacaccgacctgacgatttttgacggcgcgctggccgagatcgttgccggcgggggtccgctgccgctggcggtgagtgtcgacgaggaaggcgggcgggtgtcccggttgaggtcgctgatcggcggtacggggccgtcggcccgcgaactggcacaaacccgaaccgtccagcaggtgcgcgacttggctcgagaccgcggccggcagatgagaaagctgggtatcaccatcgacttcgccccggtggtcgacgtcaccgacgccccggatgacacggtgatcggggaccggtcgttc

SEQ ID NO: 155 - DNA, 401 bp, Mycobacterium tuberculosis H37Rv
gtgatgtacacccaggccaccagctcccaagcgttcgcgcacacggtgcgtgaggggcgcgaacagatcgtccaactggtggccgagttggtgcgggccggcacccgcggcccgcttacggacgccgaaatcgagatgatggccgtcgcgctggtgggcgccggcgaggcagtggccacccggctcggtatcggtgacaccgacgttgacgaggcggccgagatgatgatcaacctgttctggctcggcctcaagggcgcgccggtggatcggctcgagaccgggcactgacctgcgcggtatcggccactgagatgtgggtgtattttagatgcagatgtaaattcgatgtatgattcgaacgcaagtccagctcccagatgagctttaccgggacgcca

SEQ ID NO: 156 - DNA, 401 bp, Mycobacterium tuberculosis H37Rv
gcgcgatgcggcgtccgacacctggcagccgcccacgccgcgtcgactcggtccgtttcgtgcgtccgaagaaacgtggcgcgagctcgccaacgaggcgtgagtagcccgtgctctcgatcgatacgaatatcctgctgtacgcgcagaaccgggattgccccgagcatgacgccgccgccgccttcctcgtcgagtgcgctggtcgagccgacgtcgcagtctgcgaactcgtgcttatggagctgtatcaattgctgcggaatcctacggtggtgacgcgaccgctcgagggccccgaggcggcggaagtctgtcagacgttccgtcgcaaccggcggtgggcgctcctcgagaacgctccggtcatgaacgaggtgtgggtgttggcggccacgcct

SEQ ID NO: 157 - DNA, 401 bp, Mycobacterium tuberculosis H37Rv
ccgacgctgacgttggtcaccagatcgaccagcaggcccctgcggtgttcgcgcagattctccgcgcgcacccgcacgcccaccgcgtcggtgaccgcgatcggccggtattgcgtgatgtggttctcggtgtgtatcgctcccattgcggcgaacgggaagtcgaagccggtcaccaacgacatcaccgatggaaaagtcaacgcgaacggataggtcaacggcacctggttgccgtagcgcagaccggtgaccgccgcgtaggccgcgacgttggcggggtcgatcggcagctcctcgacggtcaccgtccggttgggcagctggtctgtccggggcaccacgggtagcgccccggccgccgcgcgcagcaggttcttcaggccgctgggttgagtcac

SEQ ID NO: 158 - DNA, 401 bp, Mycobacterium tuberculosis H37Rv
agccgatgatgaggtcaccgacgctcatcaagaagcgcaccgaacccaagcccaccttgtagaggctggtgacgtcctgctgcgcggccatcaggtagccggtcagtgcggccgccatgccctggacgtcggtgagcgccttggccagcagcgcgcgttcggtcttcagccggccgttgccagcaccgctgtcgacgaactcctggatctggcctgacacgtgcgccaacgccacgcccttgtcacggacgattttgcggaagaagaagtcttgtgcctggatggcggtggtgccttcgtacagggagtcgatcttggcgtcccggatgtactgctcgatcggatagtcctgcaagaagccggatccacccagggtttgcaggctttcagtgagcttggcg

SEQ ID NO: 159 - DNA, 401 bp, Mycobacterium tuberculosis H37Rv
tgcggaagaagaagtcttgtgcctggatggcggtggtgccttcgtacagggagtcgatcttggcgtcccggatgtactgctcgatcggatagtcctgcaagaagccggatccacccagggtttgcaggctttcagtgagcttggcgtaagcctgttcggagcccacacccttgactaccggcaacatcaggtcgttgaccttgacggccaacttggcgtccacaccgtgcaccacctcggcgacagccgcgtcctggaaagtggcggtgtagaggtagagcgcacgcaggccctcggcgtaagccttctgggtcatcagcgagcggcgcacgtcggggtgatgtgtgatcgtcacccggggcgcggtcttgtcggtcatctgggtcaggtcggcaccctgc

SEQ ID NO: 160 - DNA, 401 bp, Mycobacterium tuberculosis H37Rv
gtgccacctcagggttgggtagggttgggtactcgaaaccaagttacccaccagtaacaccgtcaaaatatatccgttgcataggtcaatgcaagttgatgtgagctacattgcaccaactaactaaccaaccggttgggttagcggtgatcctggccgtgtcggtcctctcacctgcggcgatagcgatcaaatgaagaatatgcggagtctagggcggcagcgcctggcagcgtagatcatcggctcacgcggatgcggcctcttggtacggacatgcgcgcggatgtccggcgagtagggtcggatgcgaaaactacgtcctcggctctaggggcgaatgaagttcggtgaactcaacgaacaacctgacgccgtcctcactgcgggaggccttcggc

SEQ ID NO: 161 - DNA, 401 bp, Mycobacterium tuberculosis H37Rv
attcacggccggtggggcgatcgggaatgtggtcgcgccgccggcggtggccgccgttccacgccgtcaccgattgttcattattgtgtcctgtttggccgtcctggctggcgtcaatgccttgtgcgcaaccatcggcaaaggaagcgtcgctggaatcctattggtggtcaatgtgacgctgatcggggtcgtttcggcgatctccttcgtcgccttcgcggatctggtggcggctatgccatcaggaaccgcccgagcccgcattcttcttaccgaggtcggagtaggggcggctttgacggccgtggtggcggcgacgctgtcattcgtacccgaccaacacccattaagcaggaacattcacctactgtggacggcagccgtggcaatggctatct

SEQ ID NO: 162 - DNA, 401 bp, Mycobacterium tuberculosis H37Rv
tgccccagaacgcccgagtggtcgcatagcagatgaacgccaaaagaccgaggttggtcagcagcggtggcaaccaccagaggtcggtgcgaagcgtccgttctgggatttgtgcgcgggtgggtgtgaaaacgccgatcgcaggacggttcgccgtgggtgcgctcatctaatgtgatcctcttcgcgtgttatctcgtcgaagggtacacagagaacggccccctttttctggggggctcggttgttcagtacctgtgacctccgacaccctcatcgtcgacatcgcgccaaaattcgcgatcgtactcggtgtcggggatggcgattttctcgctgggttgcggtacggcggcccgttccaggtctaattcagagacgtcggtgtcgagcaattcgat

SEQ ID NO: 163 - DNA, 401 bp, Mycobacterium tuberculosis H37Rv
gtaatttgcccctcataccctcagaccatgcctacggctgggagttcgcgcgcgcctgccgcggctcgcgagatcgtcgtggtcggccacggcatggtgggccatcggctggtcgaagcggtgcgtgcccgtgacgcggacgggtcgctgcggatcacggtgctggccgaggagggcgatgcggcctatgaccgggtcggcctgacgtcctataccgaaagctgggaccgcgccctgttggccttgccgggtaacgattacgccggtgaccagcgggttcggttgctactaaacacccgagtcacccagattgaccgggcaaccaagtcggtggtcaccgcggcagggcaacggcatcgctacgacaccctggtgctggccaccggctcctacgcattcgt

SEQ ID NO: 164 - DNA, 401 bp, Mycobacterium tuberculosis H37Rv
gcacgatctaggtctcgcgccctcagccaggctagatcggcgatcgttgcccgggtgcccggcaacacgatcagatcggcatcgtccagcgcgcgggggtcggaagcgaacacgacatccaagtcgggctcaagacccaatgcgtcgacatcggtgaagttgctgattcgtggcaggcgcacgacggctacccggcgggccccggtgcccgccgcgcgccggccctgtaggtcgagggcatcttcggagtccagccagaggtcggggtgccacggcagggtgccgtacaccctgcgcccggtgacccgttccaggtcgcgcagacctggcgccagcaggtcggagtcgccccgaaacttattgaccacaaaccccgcgaccagcgcctggtcctcggcagc

SEQ ID NO: 165 - DNA, 401 bp, Mycobacterium tuberculosis H37Rv
cggaggtgtcgtcgcgtcgcgagcagccacgttaaggcccagcagcgtggtggtggcccgaccgctagacaaggtttggagcgtcatgaccggttagctttctcggggtacaccgccccgggtggcaggacgcgatgacgcgagtctcctggctcccggatcgttgcttgcctcgccttccagcctgtggccgtggcttacgagggtcgctccccggtgacagtggcgggaccgcgccggattctcaccggcttcctgcatcgtcatcgcctgacgggaagaatattggcatgcagagcgtggatttgcacgttgagcggcatttgccaagcaggggtcggtcacatcgcacggtcgcaacagtcacatgtgtcactgcactaggcgacatccgatctgcc

SEQ ID NO: 166 - DNA, 401 bp, Mycobacterium tuberculosis H37Rv
ctgggccatatgacgtgtctaggcctgtgaggtttcagtcgcgttaccaggcaattgctgccggattgcccattgccgatacccacctctgtggcttcgggcgtggcgctagacgtaggccaagcccgcgggtgcggtggtcgccggcacgagctcgccggcgctctttaggccccgacgcacataaatcgcccaggtcagcaccgaggcgaccaggtagaacaccccgaaggcccaaaatgccgaggtggccgtgccactggtcaggtaggactctcgcagagccaggttgacgcccactccgccgagcgcgccgaccgccccggccaggccgatcagcgcgcctgacatcgaccgcgaccactgcctgcgctcggcttcactgatctgcagcgaatggc

SEQ ID NO: 167 - DNA, 401 bp, Mycobacterium tuberculosis H37Rv
ttgccgccacccgcgttgagcgcaagcgcggcgcccttgagtcgttgcggaaagaaagcgttgatgttcgtcatggaggcggcgaagttgccgccgccgaggccggctagcgcaccgcacaccagatacggccacagtggcaaaccagggttggccagcaacagaatgctgccaacggtcggaatcaacagcaccagtgcggaaaagatggtccagttgcgccccccgaactttgcggtggcaaatgtgtaagggaagcgcaggcatgccccgaccaaggtcgcggtggcgccgagcaggaacttgtcgccggcggaaaagccgtacaccgatgtgggcatgaacagcaccatcaccgaccagagggaccagacggaaaatccgacgtgctcggcggccac

SEQ ID NO: 168 - DNA, 401 bp, Mycobacterium tuberculosis H37Rv
ccacgccgcacggtcccggcgtccagcggctggtcgccggaaggaccgaatacggacgggaagtgggtgggctggatgcggccgagcatcacgttggcgtcggtgacgcacagcggtccgccgccgcggtagcaggccgggccggggtcggctccggccgagtccgggccgactcggtagcggctcccgtcgaaatgcagaatcgacccgccgccggcggccaccgtgtggatgtccagcatcggcgcgcgcagccggaccccggcaacctgggtcgtgaagacgcgttcgtactcgccggcgtagtgcgacacgtcggtcgaggtgccgcccatgtcgaagccaataacatgatcgaagccggccagcgccgacatccgcaccatgccgacgatgccgcc

SEQ ID NO: 169 - DNA, 401 bp, Mycobacterium tuberculosis H37Rv
gggatccggaaacgatggtgaacatgcgccgacaggccgccggagcgctgggcatcatctcctcgatcggcgcgttcggcgggtttgtggtgccgctggcctacgcctggtcgaaggtgcacttcggcaatatcgaacccgccctgcacttctacgtggcgttcttccttgccctgctcgtcgtcacctggtactgctacctgcgtagaaccacccccatgggccaggtgggggtgtagttagcccggcggcggtctcacgttgtgagccacgcgcaaactcagactctgccgatgtcaacgcccagctcggcaccgagcttgtccagcggcatggtgacgtgctctcgctcgtgcacgctgagccggtcgcgcaggtcttcaagctcttccattaggctc

SEQ ID NO: 170 - DNA, 401 bp, Mycobacterium tuberculosis H37Rv
ccgaggcggatgcggtaagtggtgtcgaagccactcatcttctcgcagccacgcgggcgcggttcgtcggcgagcgcggcgacggcggtcagatgcgccgctggtcgtggcggtgcagccgttggattgctttagctgccgagttctcgatttcgaccgcgtacccacttgccatacaaaaatgtacagacttcagatgcataatataagcgctaattttgccgacgcgctctcaccgcggccacgggctgtagtcggcgatcagctcctcctgcggcgggcgctggtcggccgggacgtgctgcaggttgatccggatccgataccagatcgaactcggcccgcgcatgccgtcgaccagcacatcggcgggccgcagcaaagccgcggcgccgggatac

SEQ ID NO: 171 - DNA, 401 bp, Mycobacterium tuberculosis H37Rv
ccgatcggcggcattttgtcgcacgtgccgttcaaggccggcgaggtgacgctgttgccgtcgccgatgttccatgcgctgggttacatgcacgccgcgctcgccatgttcctgggctcgacgctggtgctgcggcggcggttcaagcccgcgttggtgctggaagacatcgaaaagcacaaggcgacatccatggtcgttgtaccagtgatgctgtcgcggatcctcgaccagctggagaaaaccgaacccaagcccgacttgtcgagcttgaagatcgtgttcgtatccggatcgcaattgggtgccgagctggccacccgcgcgctgggggacctcggcccggtcatctacaacatgtacggctcgaccgaggtcgcgttcgccaccatcgccggccc

SEQ ID NO: 172 - DNA, 401 bp, Mycobacterium tuberculosis H37Rv
gtttgagttcggattcggcccagtcggtgatggtgtggttgcgtttgacctgcgcggagcgataccggctgataaactccggtgagtacggcggcccgttgcgttcgtcgaacaggtcaagttcgggatcggttgcaaccggatcattttcgtcaatgacggcggcgtccatccaagcggtgagcacatccggacggccgggatgagctgcggcggcaacgtatgcgtcggcggccggcaattcggttaccccggctgcgggtcgcataccgtccaggggagtcacgttcggatcgaccgcttgtgattggtaggcggccatcaatgagccaccacctgaattgccaagcaacaccactgtttccacgccctgaacttcgcggagccagcgcaccccgacg

SEQ ID NO: 173 - DNA, 401 bp, Mycobacterium tuberculosis H37Rv
ccgccgtgaccgcggcctgagtggtggcgaccagctcggccaccacccagtcgaacacgcggccgacgaattcgtccttgtcggtgaagctttcgtagaagtagcgcaccgacaggccggcccgccggcaaatggtgcggatggttagctcggcgatgtcgtgctggtcggaccccaacaggtccaggccggcagagagcgactggcgacggcgcgtcgccagtcgctcggcggcctcgacgccgcggtagggtcgatcactgcgcgtcatacggatcatcttgacactcgggcacgataccggccaatatcaggatacaggtgtttccataattagcggcagcgccgggaggccttcggatggcgatttcgctggtggctcaccagcccatcccccacgt

SEQ ID NO: 174 - DNA, 401 bp, Mycobacterium tuberculosis H37Rv
aggttcggcactgtgaaggggtcgtcggccgcaagcagtcgatcgaaccaggggcggacggttcggtgattcggatggtcaccgcggtgtgcagccagcagcacgttgacgtcgatgaggaacatcgcctatttgtgcctgtccaggctcacttccgcgagttcagttccagaccctcgtcgagcacttcggacaacaccgtattcgaggttaggtcgatacctggccgcggaccggtgccggcgtcaaaaacggggacggttggccgggcgccgccggtacgggcggcggcgagctcccgccgaagggcgtcttcgatcacagcgcccagcgattaaccacgctcgcgggcccggcgtttggcggtagccagtagttcatccgagattgacacggtggtg

SEQ ID NO: 175 - DNA, 401 bp, Mycobacterium tuberculosis H37Rv
accgcggtgtgcagccagcagcacgttgacgtcgatgaggaacatcgcctatttgtgcctgtccaggctcacttccgcgagttcagttccagaccctcgtcgagcacttcggacaacaccgtattcgaggttaggtcgatacctggccgcggaccggtgccggcgtcaaaaacggggacggttggccgggcgccgccggtacgggcggcggcgagctcccgccgaagggcgtcttcgatcacagcgcccagcgattaaccacgctcgcgggcccggcgtttggcggtagccagtagttcatccgagattgacacggtggtgcgcatgatgctcaggatagcgcatctacggcatcatctgcggtgagcaactgatgccctcaacgccgcgtgtggtcgcag

SEQ ID NO: 176 - DNA, 401 bp, Mycobacterium tuberculosis H37Rv
agcacttcggacaacaccgtattcgaggttaggtcgatacctggccgcggaccggtgccggcgtcaaaaacggggacggttggccgggcgccgccggtacgggcggcggcgagctcccgccgaagggcgtcttcgatcacagcgcccagcgattaaccacgctcgcgggcccggcgtttggcggtagccagtagttcatccgagattgacacggtggtgcgcatgatgctcaggatagcgcatctacggcatcatctgcggtgagcaactgatgccctcaacgccgcgtgtggtcgcaggtctgcctgctatggcaagccgttgagtccgttctcgccgagcagcagcccgccggtgccgccggcaccgggcgtggccccggctttgccggcgttgccgcc

SEQ ID NO: 177 - DNA, 401 bp, Mycobacterium tuberculosis H37Rv
tgataggcctggccgtgggcgccgaacagcgccgcaaccgccgtcgagacttcatcggcacccgcggccagcagtgctgtggtgttggccgccgcggccgcgttggccgcggcgatgctcgactcgagactggctaaatccgttgccgctgccgcgataacctctggcgccgcaatcacaaacgacatctgacacctcccaatacgcatgaccgctctgtcatgccgacccggggaacgtcaccagcaaaaatcggcgggctacagaataactccggcccgggaaagggatttggtatttcccaaaatatctcccacatttatgcggtcggcgcgtcggccgacgggagctggcagcacccgtgggccggcgccgagcgttcgctggtgtccggctgggac

SEQ ID NO: 178 - DNA, 401 bp, Mycobacterium tuberculosis H37Rv
ataggcctggccgtgggcgccgaacagcgccgcaaccgccgtcgagacttcatcggcacccgcggccagcagtgctgtggtgttggccgccgcggccgcgttggccgcggcgatgctcgactcgagactggctaaatccgttgccgctgccgcgataacctctggcgccgcaatcacaaacgacatctgacacctcccaatacgcatgaccgctctgtcatgccgacccggggaacgtcaccagcaaaaatcggcgggctacagaataactccggcccgggaaagggatttggtatttcccaaaatatctcccacatttatgcggtcggcgcgtcggccgacgggagctggcagcacccgtgggccggcgccgagcgttcgctggtgtccggctgggactt

SEQ ID NO: 179 - DNA, 401 bp, Mycobacterium tuberculosis H37Rv
taggcctggccgtgggcgccgaacagcgccgcaaccgccgtcgagacttcatcggcacccgcggccagcagtgctgtggtgttggccgccgcggccgcgttggccgcggcgatgctcgactcgagactggctaaatccgttgccgctgccgcgataacctctggcgccgcaatcacaaacgacatctgacacctcccaatacgcatgaccgctctgtcatgccgacccggggaacgtcaccagcaaaaatcggcgggctacagaataactccggcccgggaaagggatttggtatttcccaaaatatctcccacatttatgcggtcggcgcgtcggccgacgggagctggcagcacccgtgggccggcgccgagcgttcgctggtgtccggctgggacttg

SEQ ID NO: 180 - DNA, 401 bp, Mycobacterium tuberculosis H37Rv
aggcctggccgtgggcgccgaacagcgccgcaaccgccgtcgagacttcatcggcacccgcggccagcagtgctgtggtgttggccgccgcggccgcgttggccgcggcgatgctcgactcgagactggctaaatccgttgccgctgccgcgataacctctggcgccgcaatcacaaacgacatctgacacctcccaatacgcatgaccgctctgtcatgccgacccggggaacgtcaccagcaaaaatcggcgggctacagaataactccggcccgggaaagggatttggtatttcccaaaatatctcccacatttatgcggtcggcgcgtcggccgacgggagctggcagcacccgtgggccggcgccgagcgttcgctggtgtccggctgggacttgc

SEQ ID NO: 181 - DNA, 401 bp, Mycobacterium tuberculosis H37Rv
tggccgtgggcgccgaacagcgccgcaaccgccgtcgagacttcatcggcacccgcggccagcagtgctgtggtgttggccgccgcggccgcgttggccgcggcgatgctcgactcgagactggctaaatccgttgccgctgccgcgataacctctggcgccgcaatcacaaacgacatctgacacctcccaatacgcatgaccgctctgtcatgccgacccggggaacgtcaccagcaaaaatcggcgggctacagaataactccggcccgggaaagggatttggtatttcccaaaatatctcccacatttatgcggtcggcgcgtcggccgacgggagctggcagcacccgtgggccggcgccgagcgttcgctggtgtccggctgggacttgcattgc

SEQ ID NO: 182 - DNA, 401 bp, Mycobacterium tuberculosis H37Rv
atgaaaatcatgttcagtaagctacactctgcatatcgggctaccaacgaaatggagtatcggtcatgatcttgccagccgtgcctaaaagcttggccgcagggccgagtcgattggtcgcggtcgcctcgacagttagcttatgcaatgctaacttcggggcaaagttcaggcggatcggccgatggcgggcgtaggtgaaggagacagcggaggcgtggagcgtgatgacattggcatggtggccgcttcccccgtcgcgtctcgggtaaatggcaaggtagacgctgacgtcgtcggtcgatttgccacctgctgccgtgccctgggcatcgcggtttaccagcgtaaacgtccgccggacctggctgccgcccggtctggtttcgccgcgctgaccc

SEQ ID NO: 183 - DNA, 401 bp, Mycobacterium tuberculosis H37Rv
gcggaggatttcgtcgatcccgcggcccacgaacgcaaggccgcgctgctgcacgaggccgaactccaactcgccgagttcatcggcctcgacgaggtcaaacgccaggtgtcgcggctgaagagctcagtggccatggaactggtccgcaagcagcgtgggctcacggtcgcccaacgcacgcaccacttggtgtttgcgggaccgcccgggaccggcaagaccaccattgcccgggtggtcgccaagatctattgcggccttggcttgttgaagcgggagaacatccgcgaggtccatcgcgccgacctcatcggccaacacatcggcgagaccgaggcgaaaaccaacgcgatcatcgacagcgcgctggacggggtgctgttcctcgacgaggccta

SEQ ID NO: 184 - DNA, 401 bp, Mycobacterium tuberculosis H37Rv
attcacaccgtgttggtggcgacgaatttctttgggatcaacacgattcccatcacgctcaatgaggccgattacgtgcgcatgtggttgcaggcggccgccgtcatgggtctttatcaggcggcttcgggtgcggcactggcttcggcgccgcgcaccgtcccggcgccgacggttatgaatccaggtggcggtgcggcgagcactgtcggggcggtcaacccctggcagtggctcttagcgttgcttcaacagctctggaacgcctacacgggtttctacgggtggatgttgcagctcatctggcagttcctgcaggatcccattggtaactcgatcaagatcatcatcgccttcctcacgaatcccattcaggcactgatcacttacgggccgctgtt

SEQ ID NO: 185 - DNA, 401 bp, Mycobacterium tuberculosis H37Rv
cggccgtgctgctcagcgtgttggggtcggtggccatcgcggtgcgcccagaggcgctcagcgttgtgggctggtatctggtggcggcgactgcggccgcggccaccctgcgcgcgcgggtgtgggattcggccgcatgcaaggcgtggctgctggctcagccctatctggtagccggggtcctgttggtgttctacaccgcgaccggacgctatgtcgccgcgttcggcgcggtgctggtgctagccgtgctcatgctggcctgggttgtggtggcactgaacccgggcatcgcttcgccggagagctactcgctgccgctgcgccggctgctgggtttggtcgccgccgggctggatgtttcgctgatccccgtcatggcctacctggtcggattgttc

SEQ ID NO: 186 - DNA, 401 bp, Mycobacterium tuberculosis H37Rv
cagcgagccccgcgatggtgtgcacagcggcgcggtggcatgtgccctggtgaacaggatgccctcggcggcaagccggtccagccgcgggctgtagacgtccggatggtggtagacgccgagatagcgccccaggtcgtgccagtgcacgatcagcaggttctcgcgctgccctgtggcacgctcactcgtcacctttgtcacctctccagcgaaccgcacccggcgccgaagccggacaatagagcctatacgtcgcgaggcactagatacgccaccgatgatggcggtaggctcgctgattgaatcgcggcgacggcgtaggcgtgttgtgtcttggcgtccaggagtcacgagtcgacgggaggttcccgtgtcctttgtgatcgcacaaccggaga

SEQ ID NO: 187 - DNA, 401 bp, Mycobacterium tuberculosis H37Rv
gccgggccgaacatgctggccgcggtcaacgcccccgcccaggcgctgttggggcgcccactgatcggcaacggtgccaacggggcgccgggcaccgggcaggccggcggcgacggtgggctgttgttcggcaacggcggcaacggcgggtccggcgcacccggacaggccggcggggccggcggggcggccgggttcttcggcaacggtggcaacggcggggacggcggggccggagcgaacggcggcgccggcggcaccgccggctggttcttcggcttcggcggcaacggcggggccggcgggatcggtgttgccggcatcaacggcggtctcggcggcgccggcggcgacggcggcaacgccgggttcttcggcaacggcggcaacggcggcatggg

SEQ ID NO: 188 - DNA, 401 bp, Mycobacterium tuberculosis H37Rv
acgccagggcggcgggtttgaatcggtcggaaatgattgagcaggcactgcgcaacgagcacctgcgtgtcgctctgcgcgattacacggctaaaaccgtaccggcgttggacatcgatgcctacgcacagcgggtgtaccaggcgaaccgggcggccggaagttgatcgctcccggcgacatcgcgccgcgccgcgacagtgaacacgagctctacgtcgccgtcttgtccaacgcgctccatcgggccgcggacaccggacgggtgatcacctgcccattcattccgggccgggtccccgaggatctcttggcgatggtggtggcggtcgagcaacccaacggcacgctgctgccggaactcgtgcagtggcttcatgttgccgcgctcggtgcgccac

SEQ ID NO: 189 - DNA, 401 bp, Mycobacterium tuberculosis H37Rv
cgggccgcggacaccggacgggtgatcacctgcccattcattccgggccgggtccccgaggatctcttggcgatggtggtggcggtcgagcaacccaacggcacgctgctgccggaactcgtgcagtggcttcatgttgccgcgctcggtgcgccactcggcaacgcgggcgtggccgccctacgcgaggctgcctcggtcgtgacagctctgctctgttagccctgtcaccggcgaagatacctgatatcgccagatatcatcggaagatgagtgatgtactgattcgggacatccccgacgacgtgttagcaagccttgacgcgatcgcggcacgcttgggcttgtcgcggaccgaatacatccgtcggcgtttagcccaggatgcgcagacggctcgc

SEQ ID NO: 190 - DNA, 401 bp, Mycobacterium tuberculosis H37Rv
caaagagggcgtgctggccgccatgatggagcgcggcgcgcagcgcttctttgccgcgatacccacctgggatgaggcccatgggcccgtcgagcagcgatccgagcgccagctgaccgagctggtgagcctgcagtcgcagcatccggacttcctgcgcctgttctacctgctgtcgatggaacgaagtcaggatccggcggttgccgcggtggtgcgccgggtccgcaacaccgcgatcgcccgatttcgtgacagcatcacgcacctgctgccatcggacatcccgccgggcaaagccgatctcgtcgtcgcggagctgaccgcgttcgcggttgcgctgtcggacggcgtctatttcgccggccaccttgaaccggacacgaccgacgtcgagcgca

SEQ ID NO: 191 - DNA, 401 bp, Mycobacterium tuberculosis H37Rv
gcccgtgttgtagtcaccggtgttgaggtagcccgtgttgccactgcccgggttgaagccgccggtgttgaagctgcccgggttgaagctgccggtgttgaggtccccggggttgaacacgcccgtgttggtgctgcccgcgttgccgatgccggtgttgaagccgcccgagttcgcgagaccgaagttgccggtgccggtgttaaagatgccgacgttgccggtgcccgagttgaagaacccgatgtttccgctgccggagttgaacagcccgatgttgttgctgcccgagttgaggctgccgatcccgatctggccgttgccggtgagcccgacgccgatgttgttgttaccggtattcgcgaagccgatgttgtagctgccggtgttggcaaagccca

SEQ ID NO: 192 - DNA, 401 bp, Mycobacterium tuberculosis H37Rv
cggccaggttggcgccgatgtttgcgatgcccgagccgaaggcgggcgtcgcgaggtccagcgtgctcgtgttgtagacgcccgagatggtgttgcccaggttcgccagacccgactgcagcgcgccgaaattcagtaggcccgaattgcccaagccgccggcgttaaagaagcccgaattgccagcgccgaagttcccggagcccgacatgttgccggcgccgaagttcccgaagcccgatacatggccggcgccggtgtggaagaaacccgacgacgggccggtggtcgagttgccgaaacccggggtaccaccgatgctgatgccgatggggatcgggccgaagccgccggtgccaaccatgctgatggtttgctgaatgggcgaatcgatggcgatg

SEQ ID NO: 193 - DNA, 401 bp, Mycobacterium tuberculosis H37Rv
cacacccgtgttgtagtcacccgcgttgaagtagcccgtgttgtagtcaccggagttgaagctgccggtgttgtgatcgccgaggttgaagctgccggtattggtgctgccagtgttgaagctgccggtgttgatgctgccggtgttgatgctgccggtgttgccgacgccggtgttgacgttgcccgggttgaacaggcccgtgttggtgctgcccgtgttcccgaggccggtgttgaagctgcccgagtttgcgatgccgaagtttgcggtgccggtgtttccgatgcccacgttgccggtgcccgagttgaagaatcctacgtttccgtcaccggagttgaacaagccgatgttgtggctgcccgagttgaagctgccgaacccgatctgaccggtgc

SEQ ID NO: 194 - DNA, 401 bp, Mycobacterium tuberculosis H37Rv
gaagctgccggtgttgaagctaccggtgttgaagctgcccgggttgaaggcgcccgtgttgacgtcgccggagttgaataggccggtattggtgttgccggtgtttccgatgccagtgttgaagctgcccgagtttgcgatgccgaagttgccgctgccggaattgaagaatccgatgttgttgctgcccgagttgaacaggccgatgtttccgctgcccgagttgaagctgccgaacccgatctgtccgttgcccgtgagcccgatgccgacattgttgctgcccgtgttcccaaagccgacattgttgctgccggtgttcgcaaagccgatgttgccgccgcccgcgttagcgaaacccagattgtcgttgccgacgttgccgaagccgatgttgtagc

SEQ ID NO: 195 - DNA, 401 bp, Mycobacterium tuberculosis H37Rv
tgaccgccggtgcggacgcgagttcctcggagatcgccattgccgttcccgcgcattggaagcccggagctgtacacgcactgcgtaacggtttgcggacgcacgtcggcttcgtccgcagcggcatggcgccgcgcctggtttccgatgcgatcgcggcgttgaccgcggtgaactcggaattgggcctgccccacggcagtgtggtggggttgcttgatttcggtggctccgcgacttacgtcaccttggtggagaccaagtcggattccaggacgtcggatttccagcccgttagtgccacggcacggtaccaggacttttccggtagtcagatcgaccaggctttgctgcttcgggtcatcgaccaattcgggtacggcgatgacgtcgatccggcc

SEQ ID NO: 196 - DNA, 401 bp, Mycobacterium tuberculosis H37Rv
accgaccccgccgccaccgccgtcgaccgttgcgccgcttcccagtgcggcaccggccccgacgacggtcgcgccggcaccgccgccgcccacacaggtggtgacgaccacgacagcgccacccgtcaccacgacgccgaggccgtcgccgaccaccacaacgaccaccgcgccaccgtcgacaacgacgacaaccgagccgccggtgacgaccacttcgacgattccaacgattccgacgactacgacgacggtgaagatgaccacggagtggttgcacgtcccgtttttgcccgttccgatcccggtcccgattccgcaaaatccgggtgccggcgaaccgcagaacccgttcggaagccttggctctgggtgagccgcgttccccggagctggccccg

SEQ ID NO: 197 - DNA, 401 bp, Mycobacterium tuberculosis H37Rv
gacgacggtgaagatgaccacggagtggttgcacgtcccgtttttgcccgttccgatcccggtcccgattccgcaaaatccgggtgccggcgaaccgcagaacccgttcggaagccttggctctgggtgagccgcgttccccggagctggccccgtcggtgtcaggtccgtagtatcggtatgggttgctgaggaggtcgcgtgggcgactatggtccgtttggattcgatcccgacgaattcgatcgggtgatccgggaggggagcgagggactgcgcgacgcgttcgagcggatcggcaggttcctcagctcatccggcgcgggaacgggctggtcggcaatcttcgaggacttgtcccggcgctcgcgtccggcgccggagaccgccggcgaggccgg

SEQ ID NO: 198 - DNA, 401 bp, Mycobacterium tuberculosis H37Rv
acaccgacccgaaacgcaaagtccgcttcctgccatacggcatcgcggtcagcgtcctcgacgatccggtggacgaggcccagtaacgtcagccctgctggacgctgttggaaccgccggcattgctgatcttcggcgagcccgagtgatacgtgacctcgttgttgaagccggcggcttcgatggtgtcgacggagtcgacggtgaccgagttcctcatgccggacacggtgaggctggtgcagtggccggtgatcaccaccgtgttggacatgccgctgacgctgacaatgctgtcgttgcaggcgattgtccggttcacgttgacgccggagacgctcaggctggcgccggccggcggaagagtggtggccggttgcgcagtcggggttggaacagcc

SEQ ID NO: 199 - DNA, 401 bp, Mycobacterium tuberculosis H37Rv
ccccatgctgttcatgggcaatctgaacgacgtaaatcctctgtgcgccatggcaatccgccccccatggcgaagaaattccacggtaggtgcgccaccgtcgctcatcaggtcagtatcacatagcctcggccgccgggggcgtccacgccgggggcagcaccgctctgtcggcgacggttcctgtgcaccagccgctttcgcatcgcagtggtaatgggcgctcccatacggcgcggtcggcgacgacggtgcatgggccggccatcgttttgggccttccccgccttgccgccgggccaccgacgttcagcatcaccatcagcgtcgacgtgtcacatcggagccgatgacgggaatcgaacccgcgtattcagcttgggaagctgatgttctgccat

SEQ ID NO: 200 - DNA, 401 bp, Mycobacterium tuberculosis H37Rv
cttcatcgatcctggcttcagcggtcacatcaccctggagctatccaacgtcgccaacctgccgatcactttgtggcccggcatgaaaatcggtcagctgtgcatgttgcgcctgaccagcccgtccgagcatccctacggcagttcccgggcggggtcgaaataccagggtcagcgcgggcccacgccgtcgcgctcctaccagaacttcatcaggtctacttagcatccggcgcggctaggcctgtcgcgggtagctgtcacctgccgtttgcctggtgctcagcgccgcgatgcggttcgctcatcgcagccacctacacacagtggtgtgcgatgcagcgtcttcggcactgggtatctgggtgccacccacgccgtcggtatggcgcaactgggac

SEQ ID NO: 201 - DNA, 401 bp, Mycobacterium tuberculosis H37Rv
gtttggtgaagcggcagccagaactgctcgttgcccagcatgaacactggcaggacacctaccgagcgcatccggtgctgtacggaacccgcccgtcagagccgggggtatatgccgccgaggtgttcaatgccgacggcgtgcagcgggtgctggagttggcggccggtcatgggcgtgacaccctgtatttcgctggctagggcttcacggtggtggccaccgatttcagcgacgttgccgtcgcgcaacttcgccgaagtgcccaagcgcgcggggtctccgcgcgggtgcaaccgattgtgcacgatctgcgccagcctctgcccgtcaaaaccggttccattgacggcgcctttgcacacatggcgttgtgtatggcgttgtccaccagcgaaatt

SEQ ID NO: 202 - DNA, 401 bp, Mycobacterium tuberculosis H37Rv
gcgcaacttcgccgaagtgcccaagcgcgcggggtctccgcgcgggtgcaaccgattgtgcacgatctgcgccagcctctgcccgtcaaaaccggttccattgacggcgcctttgcacacatggcgttgtgtatggcgttgtccaccagcgaaattcatgcagtcgttgccgaggtcggccgggtgttgaggccgggtggaaagttcatctacaccgttcggcataccggcgatgcgcactacggcgccgggcaggcccacggtgacgacatcttcgagtgcgcagggttcgcagtgcacttcttccgccgtgagctggtagcgcgcctggctaccggttgggtactcgaggaggtacacgatttcgaggaaggtgagctgccccggcggctatggcgggt

SEQ ID NO: 203 - DNA, 401 bp, Mycobacterium tuberculosis H37Rv
gacttttgggtcagtgaccccgaaaacgacccgcaggatgatgtcgagggtgagcgcattcatgtggtcaagactgttgatcgttgcgtggggccgccagcgcgtgatgtgttcacgcgcaacggaggcgatcatgtcgcggtatccgcgcagcgcggcgcgggtgaacgcgggcatgagcagcgatcgcatccgcgcgtgttcggcttcgtcggtcatcaataccgagtgctcgcccatgacaaaaccaaggatgtggttgccttcgcccgcgtgcagcgacctcgggtcggccgcgaagatctctttgatgtgttcggggcgggtatagaccacgaggttgtcggcatatgggggcacccgcaaggagaacacgtcgccgtacttgcgatgcatcgctg

SEQ ID NO: 204 - DNA, 401 bp, Mycobacterium tuberculosis H37Rv
ctgcactgcgcttgatgccgacgtcgatgaagccggcagcgccaagccacgcggcggtgtcgagggtggggggcacgcgatagatcgcgggatcgaaacgggccgccagtggttggtcatcggatatcgatgtaaggacgagtcgacccccgggccgcagggctcgagcgatgtcgcaaaggctggcgcggggatcgggccagaagtaaaagttgtgcacgccgagcaccttgtcaaggctgtggtcggcaaccggcagggttactccatcgccgtgataaagcgagatcaggccggctgcaatggctttcgcgttgtgatgggccgcgattgcgatcatggtcgtcgacacctcgacgccgctcacttgcgcgccggcggcggcgagcagcccaagggtt

SEQ ID NO: 205 - DNA, 401 bp, Mycobacterium tuberculosis H37Rv
agcgccacttcaccggcacgggcgcctgctacgtcgagaccggtgatcaccaggcagccaagggcgacggcgatttcttcgctccgtcggcgccctcggtgacgctgtacccgccgtcgcgggagtttcacgaggagaaggtcgcacaagaactggcctggctgacccgctggaagacgtgacacgccggtgggcgcggccccctaccacggctcctaccggcgcccctgaaacaccagactgtggataaccgctgttgcgcaagcctgctagtagcctcgccaaggtggactactcgtcggcatacctggagcagacccacgccttcggcgaactgatccgcaacgtcgatcaatccaccccggtgccgacctgcccgggctggagcctgggtcaactat

SEQ ID NO: 206 - DNA, 401 bp, Mycobacterium tuberculosis H37Rv
ggtcgcagtgcaccgcgccgacgtggcgatcaccgtcgggggcgaattcacactggaaccgaacgtggcagccgacgggatcagcgaattcctggagcgcatagcggtccaggccggcagcggcggcacgccattaccgctcgaagacgacgacaccttacatctgcacgccaccgatccggggcttcttgaagccggcgaatggacggttcgtcgcgacgagcgcggcgtcacctggtcgcatcggcacggaaagggtgccgtggcactgcgtggcggcgccaccgagctgctgctggcgatggtgcgccgactctcggttgccgacaccggcatcgagctgttgggggatgccggggtatggcaaaaatggctggatcgcacgccgctgtagccgccgc

SEQ ID NO: 207 - DNA, 401 bp, Mycobacterium tuberculosis H37Rv
cccggcaccggaagccgacccaccctacgaccattgcgaccagcgcacagcgatgatgcccaaacgccggcgcacccgcgcccaagaccgggcctatcgcatcgccaccgaacgtcgacaaaaccacgccgcccgccagcgcgcccaggtgctcacccagaccgccgcggccaccgacacccacggcccaccaccggatcccaacgacgacccaccgccgttttgatgtggaacggcctgtcaagtggccgattagtgcttgttgcctcggggttgtttggggtttctggctttgatccgatgacgggaccctgcggcgctccctcgacgccgccgcgccggcttaagggcgcccggccgcgctgccacccccagggcatcacgtgcgtcggctgctattg

SEQ ID NO: 208 - DNA, 401 bp, Mycobacterium tuberculosis H37Rv
agcaggatgaagaagccccacatggtgaaaaagtgcgccaggcccgggatcgaccatttcaacagtcggcgctgccctagaacctcggagatctgggtccagatgcgggtgccgaggttgtcggttcgcccgctggccggctgcccggacatgaccagcttgtaaagccaccagactcgccgcagagcgaacacccccaccaccgcggtcatgctcatgcccagtatcagcctgatgagcgtttgcgtggtcacggaaggtcaccccaattcgtagcactcaatggaacccctgcataacctgctcatcctgacatctgtgcgactttcgccgcgagaaaggctgtcctaacctaccggtcgtcaacgcctctcatctgcggttaagctctccggggccag

SEQ ID NO: 209 - DNA, 401 bp, Mycobacterium tuberculosis H37Rv
cggcgctgccctagaacctcggagatctgggtccagatgcgggtgccgaggttgtcggttcgcccgctggccggctgcccggacatgaccagcttgtaaagccaccagactcgccgcagagcgaacacccccaccaccgcggtcatgctcatgcccagtatcagcctgatgagcgtttgcgtggtcacggaaggtcaccccaattcgtagcactcaatggaacccctgcataacctgctcatcctgacatctgtgcgactttcgccgcgagaaaggctgtcctaacctaccggtcgtcaacgcctctcatctgcggttaagctctccggggccagcatggcccgcagcatcgacaacatctccgaccgggagccagcgcccagccgctggcgtatccgggc

SEQ ID NO: 210 - DNA, 401 bp, Mycobacterium tuberculosis H37Rv
cgacacggtgacccagcccgatgacccacgtcgggtcggtgtgatcgtcgaactgatcgatcacactatcgccatcgccaaactgaacgagcgtggtgatctagtacagcggttgacgcgggctcgccagcggatcaccgacccgcaggtccgtgtggtgatcgccgggctgctcaaacagggcaagagtcaattgctcaattcgttgctcaacctgcccgcggcgcgagtaggcgatgacgaggccaccgtggtgatcaccgtcgtaagctacagcgcccaaccgtcggcccggcttgtgctggccgccgggcccgacgggacaaccgcagcggttgacattcccgtcgatgacatcagcaccgatgtgcgtcgggctccgcacgccggtggccgcgagg

SEQ ID NO: 211 - DNA, 401 bp, Mycobacterium tuberculosis H37Rv
atcgccacagcggtcggcgacaacttcgtgtgggcataccagcgttccgaagcgttggccgacgacgtcgctcgctcctttgccgacgcggggttggactcggtcctgtcagcagagctgagcccccacgtcatgggcaccgacttcggccggctcaaagcgctgggccggatggaatcgaaaccgctgcgccggggccataaaatgattatcggcatgcggggttcctatggcggcgtggtcatgattggcatgctgtcgtcggtggtcggacttgggttgttcaacccgctatcggtgggggccgggttgatcctcggccggatggcatataaagaggacaaacaaaaccggttgctgcgggtgcgcagcgaggccaaggccaatgtgcggcgcttcgt

SEQ ID NO: 212 - DNA, 401 bp, Mycobacterium tuberculosis H37Rv
gcaggggtccaagccggtaatcggcaccgtcatgcggcagggctaccaactgggtgagcaggtgctgcggcacgccttggtcggcgtcgtcgacacggtggtcgtcgacgcggccgaactggagtcagtcgacgacggcactgcggtcgcagataccgccgaaaacgatcaagctgaccagggcaatagcgccgacacctcgggcgaacaggcagaatcagaaccgtcgggcagttaacaacaaaagaggaaggcgagagggggtgacgcgacatggcccaaagggaatgggtcgaaaaagacttctaccaggagctgggcgtctcctctgatgccagtcctgaagagatcaaacgtgcctatcggaagttggcgcgcgacctgcatccggacgcgaaccc

SEQ ID NO: 213 - DNA, 401 bp, Mycobacterium tuberculosis H37Rv
aagttggcgcgcgacctgcatccggacgcgaacccgggcaacccggccgccggcgaacggttcaaggcggtttcggaggcgcataacgtgctgtcggatccggccaagcgcaaggagtacgacgaaacccgccgcctgttcgccggcggcgggttcggcggccgtcggttcgacagcggctttgggggcgggttcggcggtttcggggtcggtggagacggcgccgagttcaacctcaacgacttgttcgacgccgccagccgaaccggcggtaccaccatcggtgacttgttcggtggcttgttcggacgcggtggcagcgcccgtcccagccgcccgcgacgcggcaacgacctggagaccgagaccgagttggatttcgtggaggccgccaagggcgt

SEQ ID NO: 214 - DNA, 401 bp, Mycobacterium tuberculosis H37Rv; identical to SEQ ID NO: 213

SEQ ID NO: 215 - DNA, 401 bp, Mycobacterium tuberculosis H37Rv
atgttcgcgttgccaatgttgccgaagccgacgtttgaattgccgaggtttgcactgccgaggtttgcactgccgaggtttgcactgccgaggtttgcactgcccacgttgaattggccgaggtttgccaggcccgcgttgaaggtcgacccgttcgggccgcggagcacgccggtcaggtcggcgccgacgttggagagtcccgagaggttagccggcgtcgcgaagtccgccgcactggtgttgtagaagcccgagacggtgttgcccaagttcgcccagccggattgcagcgagccgaagttctgcaagccagagtttcctatgccggcgaaagcggtgttccagaagcccgaattgttggcgccgacgtttccgaatccagacgagctgccggtgcc

SEQ ID NO: 216 - DNA, 401 bp, Mycobacterium tuberculosis H37Rv
gcggtaccggagttccaggagccgaacccctgttgattgtggccggacagcccgataccgatgttgttgttgccggtgttggcaaacccgatgttgttgctgccgctgttggcgaagcccaggttgaaatcgccggcgttgccgaatccgaagttgtagctgcccaggttgcctaggccgatgttgtagttacccaggttcgccgggccgatattgtatgagccccggtttccggagaagacgttgaagctgccgatgttgccatggccgacgttcgcgttgccgaggtttccgaggccgacgttggagtcgccgatattgccgtggccgacattcccgctgcctacgttgccaaacccgaggttgaggatctgggtgttgttgacgaagccggcgaccgt

SEQ ID NO: 217 - DNA, 401 bp, Mycobacterium tuberculosis H37Rv
gttgaggatctgggtgttgttgacgaagccggcgaccgtagcaccgacattccctccgccggagagattggccggcatcgaaagcccaagcgtgctcgcattgacaaggccggagacagtgttaccgaagttgaacccgccggagatcagctcgccgaagttctggacgcccgagattcccgagcttccagaggtgaggttgaagaagccggaactattgctgcccacgttgccaacgcccgacacggtaccggtaccggcgttgaagaatcccgacgacggggtggtcgtcgagttcccgaatcccggggccgccggtatatcgatgagtggaatcttgatcggcaatagaccgccggtgccggcgatatcgatcagcgggtccggcccgctacccaggt

SEQ ID NO: 218 - DNA, 401 bp, Mycobacterium tuberculosis H37Rv
gttgacgacaccgtgctgttcgatggcgatgtggccggggtgtgcatcgagccgacgctgaccctgccaggcctgcgagctgcggtagacggcgccggaaagtggcggcggtggatcggcgggcgcgccgcgcagctaggcaccaccggtgctgcggtacttcgggacggtgtcgcggcgccccgcccggtgcgccgatcgacgttttaccgcaacgtcgagggttggctgctggtccggtagttttcgaccggtgagcgagacgggccagcgcgagtcggtgcgacccagcccgatctttctgggcctgctcggattgacggccgtcgggggcgcgctggcctggctggccggggagacggtgcagccgctggcctacgccggggtgttcgtcatggtga

SEQ ID NO: 219 - DNA, 401 bp, Mycobacterium tuberculosis H37Rv
tggacggctatgcggccctggagccgcacctgagacccgagacgcagcgcgccctggcgccggccaagcagttcgctttggtgtttctgctggtcctgttcctggcgccgacgctgaacgggtggtttttcggggtggtgtactggctcttcgacctgtctggcgtgtcgcaccggctggccgccgcgggcagcgtgctggcccgtttctggagtatctggttctgaccgttcagagcccaagcgccggacgggccgcggggtcacagtcgtcaagcagatccaggcagcgtccatactcgtcggtctcgccgatagcggctgcggcgcgcgccagcgccgccacacaccgtaggaaaccccggttgggctggtgggaatacggcaccgggccgaagccct

SEQ ID NO: 220 - DNA, 401 bp, Mycobacterium tuberculosis H37Rv
gcagacaatcatgggccacaacctgatggcggttcccgtcgtcgatgccgacaaccggctactgggcatcatcgccgaagacgaagccatcgacattgccgaggaggaagcaaccgaagacgccgagcgccagggtgggtcggccccgctcgaggtgccctacctgcgggcgtcgccgtggctgctatggcgcaagcgggtcgtctggctcctggtactttttgctgccgaggcctacaccggcagcgtcctgcgggcgttctccgacgaaatggaggcggtgatagcgctcgcgttcttcatcccactgctgatcggcaccggcggcaacaccggcacccagatcgccaccactctggtccgcgcgatggccaccggtcaggtccggtttcgcgatgtgc

SEQ ID NO: 221 - DNA, 401 bp, Mycobacterium tuberculosis H37Rv
cgataattctggctcgattcgtgccgatcgcgcggacttttgtgccagtcattgccggggtgtcctacatgcggtatccggtgttcctcgggttcgacatcgtcggcggagtcgcctggggtgcgggtgtgacgttggcgggctactttttgggcagtgtcccgttcgtgcacatgaactttcagctcatcatcctggccatcgtgttcgtctcactgttgcccgcactggtctcggcggcgcgggtctaccgggcgcggcgtaacgcaccccagagcgaccccgacccgttggtgttacccgagtgagctgaccgctgcggcgctgtgggcggcttccatcagcatccaacccgatagctgcaccgacagatctcgctcggcaatcgccgagctatgcac

SEQ ID NO: 222 - DNA, 401 bp, Mycobacterium tuberculosis H37Rv
aacgtggtggcgaccaaggcgaggtatcgggcggtgatccccgcgaacaggccaccgtccccgccgccggcgccccgtaacacacccaatggagccatgtgctcgttgacggccgcgaccaagcgatgaacgcgagcgcagtgccgcgctctggctgccggaccggtgcgcaccgccagctcggtttccagcccgagcaccaccccttggcagtaggtgtactgcgcgcggaccaacgacccggccttgatgccgtcgaataccaggtgtgtctccggatcgatcagcgtgcgatcgatccagtcggccatctgttctgcgcgcttgagccttttcccgtactggtctgggtagcgggccaggaatagcccggccgggccgttggctggggcgttgaagaa

SEQ ID NO: 223 - DNA, 401 bp, Mycobacterium tuberculosis H37Rv
ggtcgacggctttgggcacgacatctctcctcgggtgtagcgatctgttacagcttatagcaaagtgctacaccgagctgtggtgaggggcgcacacggctagcgggcaccggccagcgccagcagcaactggtgcaggccggccagcgagtgcgccggcaggaacaggtcgcaatagggcagcgccgccgccatcgaaccggcacgcggctggaactccggatgtgccgcgcgagggttcagccagaccagcaactcggcgcggcgacgcaccctggtcagtgcgtgcaccaacacgtcgggcggatcgctgtcccagccgtcggaggcgatgatcaccaccgcgccgcgtaacgcgttgccatgcggcggggccagcagggcggcgacactacggccga

SEQ ID NO: 224 - DNA, 401 bp, Mycobacterium tuberculosis H37Rv
gcggcggggccagcagggcggcgacactacggccgatgaacgtaccgccgtagcggtcggtcaccctagcgttggcccgatgtagcgccatctcggccgagcgatgagacagcaccgaggtaagtcgagtcagcgacgtcgaaaacgcgaaaacctccgggtggccccctgcccggcgcagcaccgccgcccgcatcagacgcagatagatggcggcgtagggctgcatcgagcggctcacatcgcagagcaggagcacccgcctggggcgtcggcggggccggatccgtgccaacagcaccgactcccagccagtcgaccgcgacgcgttcatcgtcgcccgcaggtcgatgcgcttgccgtgcgggctggactcgaatcgcatgctgcgccgccgcggc

SEQ ID NO: 225 - DNA, 401 bp, Mycobacterium tuberculosis H37Rv
cgggactcgaatccgctgcggtgaggtctgcgaccccgagtgccaccaaagccgccacccagtcgatagtctcggccacaccgggtggcttgtccagatcgagatcccgtgcagtgcaaacgaattgagtggcgttctcgatcaacggcgcggtagccccgggcaccgtgcggcgcacgatcgcggccgcccggtccggccccgggtagtcgatccagtggtagaggcagcgccgccgcagtgcgtcgtgcaggtcacggctgcggttggacgtgagcaccgcgatcggcgggcactccgcgaggaaagtgcccagctcgggaacggtcaccgcggactcaccaaggaactccagcagtaacgcctcgaattcgtcgtcggcccggtcgatttcatcgatg

SEQ ID NO: 226 - DNA, 401 bp, Mycobacterium tuberculosis H37Rv
cgccgcaatcgacaccgcgatctccgccggagttttggcgccgatggccaatccgaccggggtatgcacccgggcccgctcggcatcggacaggtccagcgaatccaggatggacgcgccgcgtaccgtgctggccaccagcccgacatacccaacgccgttatccagcgccgtgcggatgatttcggcttcgggcccgccgtggctggcgatcacaatcgcagttggcaaggcgtcggtgtcggccggatcggtgtcgcggcgcgcgtcgtagcccaacaggccgcacagttcgatcaacgcgtcggcgatcggggtttcgccgtaaatctggatcagcggggccggcagctgcggggtcaggaagatctccagggatccgccggccaggcacgggttga

SEQ ID NO: 227 - DNA, 401 bp, Mycobacterium tuberculosis H37Rv
tcgatgccctcgggcagatcgccggcgccgtgcgcgcgcatcgcgatgtcggcgatggtcaccgcggccgacgggtcacccttgacgtggaacttccctttctcccactgtaagtcggcgaccgaaacctcgagcatgcccgaggcgatgatcttggccttgtcgcgcaccttgcgggcgaccagcgccgcggcaccacccgagacgggtgtggaccggctgccgtaggtgcccaacccgaacggtgtctggtcggtgtcgccgtgcaccacctcgatgtcgtcgggcgcaatccccagctcctcggcgacgatctgcgcgaacgtcgtctcgtggccctggccctgggtctgaaccgaaagccgcagcacggctttgcccgtcgggtgcacgcgcagctc

SEQ ID NO: 228 - DNA, 401 bp, Mycobacterium tuberculosis H37Rv
acaccgcctcggtcgccgccgcgtcgccggtctcccagtcgaagatgtgattgtcgctctttccctccagatcggtgcggatgaccggcgccgacgggtccagcgccgtgcgggcatccacgacgggatcccgcggttcgtagtcgacgtcgaccaactcgcatgcatcgcgggccgaataccggtcctcggcaaccacgaacgccacctcttggccctggaagcgcgtcttgtcggtggccagcacggcttgtacgtcgttggctagtgtcggcatccaagccaggcccttggcggccagatcggcgccggtcaccacggccttgactttcggatgtgcctgcgcggcagtcacatcgatgcgcacgatgcgggcatgcgcatacggcgaacgcaggatg

SEQ ID NO: 229 - DNA, 401 bp, Mycobacterium tuberculosis H37Rv
cgaacgcaggatggccagatgcaacatgcccggcagcgcgacgtcgtcgacgtaggttccgcgcccgcggatgaatcgcgggtcctctttgcgcatcatccggccgtgcccgcacggctgctgagcgttgtcggctaggtcttccggcgacggagggcgtgactcgatcgttgtcatgactgcgcctttacggtctggtgcgctgccgcccactgaatggagcgcacgatcgtggtgtatccggtgcaccggcagatctgccccgagatcgcttcccggatggtctgctcgtcgggatccgggttgcggtccagcagggcgcgcgcggtaatcagcattcccggggtgcagaagccgcattgcagcccgtggcagcgcatgaacccttcctgcaccgggtc

SEQ ID NO: 230 - DNA, 401 bp, Mycobacterium tuberculosis H37Rv
cgtcgggggcgccacgctggccattggctttgcggtcgccaaggatcttgccgccggacggttggtgcacgtgaccggtcctgggctggatcgcgccggcgagtggtgtgtggcgacattggcgccttcggcccgccaacccgccgtctccgagcttgttggcttcatcagcaccccgaggtgtattcaggcgatgatcccgggtagcggggtcggggtgacgcggttccgcccaaaggtccacgtcaccctgtggagctagctacttcgacttgaaaggctcggcgcgccggtccgcccgttgacggggcccggctgcgaggattagccagttcccttgtcgcacaggagcgttgaggctatcgccgtacgcctactgcgtgcgatcagcgcttgctcgt

SEQ ID NO: 231 - DNA, 401 bp, Mycobacterium tuberculosis H37Rv
gggggcgccacgctggccattggctttgcggtcgccaaggatcttgccgccggacggttggtgcacgtgaccggtcctgggctggatcgcgccggcgagtggtgtgtggcgacattggcgccttcggcccgccaacccgccgtctccgagcttgttggcttcatcagcaccccgaggtgtattcaggcgatgatcccgggtagcggggtcggggtgacgcggttccgcccaaaggtccacgtcaccctgtggagctagctacttcgacttgaaaggctcggcgcgccggtccgcccgttgacggggcccggctgcgaggattagccagttcccttgtcgcacaggagcgttgaggctatcgccgtacgcctactgcgtgcgatcagcgcttgctcgttcca

SEQ ID NO: 232 - DNA, 401 bp, Mycobacterium tuberculosis H37Rv
cgggaagaagccgaacgcgacgcgcataaggcgctcgcgtgcgcggccgagagcggggcacacctggatctccccgacgtgctcgaatgccttgccggcctggccagcgacgccggcacccaccatgcggcggcacgactcttcggcgccgccgaggctatccgacagcagatcggctcggtccgcttcgcgatttaccgttcggactatgtgcagtcggtgacggctctgcgagatgcgatgggggagaaagacttcgacgctgcatgggccgaaggtgccgcgttgtcgatcaaggagacgatcgcctatgcgcaacgtggccactcctggcgcaaacgaccggccaccggttgggaatcgcttactccgaccgagattgacgtcgtgcgactggttgg

SEQ ID NO: 233 - DNA, 401 bp, Mycobacterium tuberculosis H37Rv
acacctggatctccccgacgtgctcgaatgccttgccggcctggccagcgacgccggcacccaccatgcggcggcacgactcttcggcgccgccgaggctatccgacagcagatcggctcggtccgcttcgcgatttaccgttcggactatgtgcagtcggtgacggctctgcgagatgcgatgggggagaaagacttcgacgctgcatgggccgaaggtgccgcgttgtcgatcaaggagacgatcgcctatgcgcaacgtggccactcctggcgcaaacgaccggccaccggttgggaatcgcttactccgaccgagattgacgtcgtgcgactggttggcgagggactggccaacaaggacatcgcgacgcggcttttcgtctcaccgcgaacagtgc

SEQ ID NO: 234 - DNA, 401 bp, Mycobacterium tuberculosis H37Rv
caaccatgtcggagccggatggatggctaagcggtcatcaagttcggatggcttgggttatcaggtcactcagttgcccccacctcctcatagcaaaagtacacaggcagatgtgagcggagttgcgaaaatagacaaataattgagccgagcaacgaccgagcgagagggtgagctggtgatcgacggctggacggaagaacagcacgaacccaccgttaggcatgagcgcccagcagctccccaagacgttcggcgggtgatgttgctgggttcggccgaacccagccgggagctggcgatcgcgttgcagggcttgggcgcggaggtgatcgccgtcgacggctatgtcggcgcgcctgcccaccggatagccgaccagtcggtggtggtcaccatga

SEQ ID NO: 235 - DNA, 401 bp, Mycobacterium tuberculosis H37Rv
cacggcggcgctggacgcggccaagtcgatcgccgcgcgcatcgtcaaggcgctcgggggacgcggggttttcggcgtcgaattgatgatcaacggcgatgaggtgtatttcgccgatgtcaccgtgtgtcctgccgggagtgcctgggtcaccgtgcgcagccagcggctttcggtgttcgaactgcaggcccgggcgatcctgggtctggcggtggacaccctgatgatctcgccgggtgccgcgcgggtgatcaacccggaccacacggcaggccgggcagcggtcggcgccgcaccacctgccgatgcgctgaccggtgcgctcggtgtgccggaaagcgacgtcgtgatattcggccgcgggcttggggtggcgctggccaccgcacccgaggtgg

SEQ ID NO: 236 - DNA, 401 bp, Mycobacterium tuberculosis H37Rv
gttccacgatcacccttccggcccggtcgatttcggttccgtcggatccctcggcgatcatcttgcccagcgggctggccgccacgccggccgcccaaaccttgcacgcgcattcgatgcggcgttcgccgccgtccttttccttgatggtgatgcctttgtagtcgaccgcggtcaccatcgcgttgagttgaacctcgacgtccatcttttccagccgccgttgtgccttgagacccagctttggacccatcggcggcaacaccgcgggtgcggcgtcgagcaggatcacccggcactcactgggcgtgatggtcctaaacgcgcctgccagggtgcgctcggcgagctcgacgatctgcccagccacctcgacgccggtcggcccagcgccgacgacg

SEQ ID NO: 237 - DNA, 401 bp, Mycobacterium tuberculosis H37Rv
gacgggctgatcccggccgagctggtggccgagttggccaagaccgccgggctgcagccgatcccggtcccggccgggaccgagccgggttatcggccctcggtgaagctggcggcgtttgtgcgggcccgggatctgacctgtcgggcgcccggttgcgaccgcccggccacccagtgcgacctggatcacaccatcgcgttcgccgacggtggggccacccacgcggccaacctcaaatgcctgtgccgtcttcatcatttgctggccaccttctgtggctggcgcgcccagcaactgcccgacggcacggtgatttggacgctgccgggtaaccagacctacgtcaccaccccgggcagcgcgctgctgttcccggcgctgtgcacccccaccggtga

SEQ ID NO: 238 - DNA, 401 bp, Mycobacterium tuberculosis H37Rv
tggagttcgacgacgccgcgatggctgaggcgatggaggagatggccgagcccgatgatgacggggaggattggtagcgatgctgcttgatgaacccaaaggtcgtcacgggcacgctcaaaacgttcttcgtgtaatcggtgccatcatttgctggccaccttctggggctggcgcgcccagcaactgcccgacggcaccgtgatttggacgctgccgggtgaccagacctatgtcaccaccccgggcagcgcgctgctgttcccggcgctgtgcacccccaccggtgacccacctcgacccgacccggcccgcgccgaccgccgcgggcagcgcaccgcgatgatgccgcgccgggccagcacccgagcgcaaaaccgcgcccactacatcgccgccga

SEQ ID NO: 239 - DNA, 401 bp, Mycobacterium tuberculosis H37Rv
gcagttgatcggtaagggtggatagatcagccacgcggtccttgaggttctgcaggttttcgatggtcatcgtgctttgcatgccgagctgaaacgggatcgacgagtggtcgatcggagcccccaacggtctggtaatgctttgcacccgcgcgatccccggcgtatggaagacggttttggcgatcctgtccaggatgagcatgtcggtcgggttacgcaggtcgtgatcggcctcgaccatcaggacctccggttccatgcgggcttgcggaaagtgacggtctgatgcgaggtaaccgatgttggatggcgccgcgctggggatgtagtagcgctcgttgtagttggtctggtatttcggcaaggcgagcagtccgatcagcgctatcagcagggtg

SEQ ID NO: 240 - DNA, 401 bp, Mycobacterium tuberculosis H37Rv
tgttcatggattacgacacaaaaaccggcgaccaaattgaccgaatgacgtggagtcaattatattctcgcgtcaccgccgtgtctgcgtatctaataagttatggccggcatgctgaccgacgaaggaccgcagcgatatcagctccgcaaggtctggactatgttgcaggatttctaggagcactgtgcgccggatggacgccggttccgttaccagaaccgctgggcagcctacgcgataagcggactggactggctgtactcgactgtgccgccgacgtcgtgctgacgacgtcgcaagccgaaacgcgggtcagggccacgatagctacacatggggcgtctgtaactacgccggtcatagcgttggatacattggacgagccatccggagataac

SEQ ID NO: 241 - DNA, 401 bp, Mycobacterium tuberculosis H37Rv
tatgctgcctacccggttttcgccgaggccctcgatgctgtggtggacgagttggaccggcacctgcggtatccgctgcgcgatgtgatctgggggcacgaccaagatctgttgaataccaccgaattcgcccagccggcgctgtttgcggtggaggtggcgctgtatcggctgctcatgtcgtggggggtgcggccgggtttggtgctgggtcattcggtgggcgagttggccgcggcgcacgtcgccggggcgctgtgtttgccggatgcggcgatgctggtggccgcgcgtggacggttgatgcaggcgttgcccgccggcggcgccatgtttgcggtgcaggcccgtgaagacgaggtagcgccgatgctggggcacgatgtgagcatcgcggcggt

SEQ ID NO: 242 - DNA, 401 bp, Mycobacterium tuberculosis H37Rv
tgtgagcatgccgcagcggtgctggggcgcgacggcgctgccggactcgacgctggccaggcgtttgccgattcgggatttaattccttgagtgccgtggagctacgtaaccgcttaacagccgtcaccgcagtaacgctgccggccaccgcgatcttcgatcaccccaccccgaccgaactagcccagtatctgatcacccaaatagacggtcacggcagctccgccgccgcagcggcaaacccggcggagcgaatcgatgcgctcaccgatctttttctacaagcttgcgatgcgggtcgggatgccgatggttggaagatggtcgccctggcgtcgaatacgcgcgagcgcatgagctcaccggttcggaacaacgtatcgaagaacgtcgcactgct

SEQ ID NO: 243 - DNA, 401 bp, Mycobacterium tuberculosis H37Rv
gactcaccgcggcagccacctatgctgcaatctttcaggcctgggaaccaggtagatcaatggctccggttcttaacatcgtggcgaaggaccgaatagctaccgtcgaaaatttacgcgaagaacgaatcaaccggtggcgaactgctgctgcagaggcggcctattctgtagccgaagtacccggggatcatttcggaatgatgagcacctcgagtgaggcaatagctaccgaaatacatgattggatttctgggctcgttcgagggcctcatcggtagctttgcgaatcggcccgtgccacagctcgccgtgaccaggtgccaggatgttggtctctagcaaagccagcgcagccaggctgcggatactgttctgctggctgtggctgaacaccgcgg

SEQ ID NO: 244 - DNA, 401 bp, Mycobacterium tuberculosis H37Rv
ttgacagctgagcagaagcacagcatcgacgacccgatcgagatggagaaggccgccgatgcgctgccaatcgaacagatcgccaagcgctggatcgtggcgtcggaccccgacgaagccgtcgaaaaggtaggtcaatacgtgacatggggcctgaaccacctggtatttcacgcaccaggacatgaccagcgccggtttctggagctcttccagtcggacctggcacccaggttgcggcgacttggctgactcctcggcgatctacctcgccgcaccagaatcgcagacgggtaagtcgacgattgcactggggcttttgcaccgactgaccgcgatggtcgccaaagtcggtgtgttccggccgattacgcggctctctgcggagcgggactacatcc

SEQ ID NO: 245 - DNA, 401 bp, Mycobacterium tuberculosis H37Rv
actgctcgcgcacaccagtgcgggcctgccctatgagcggtgtgttggcgtgacctaccagcagctgcatgctgaccgcgacgacgcgatcgccgaaattgtcgattcgtatcacgcaatggccgacgagtgtgacgcggtggtggtcgtcggcagtgactacaccgacgtcaccagccccaccgagctctcggtcaacggccggatcgcggtgaacctcggcgcgccagtgttgttgacggttcgggcgaaggaccgcacccccgatcaggtcgccagcgtcgtcgaggtctgcttggccgagctggacacccagcgcgctcataccgcggcggtagtggcgaaccggtgcgagctgtccgcgataccggccgtgaccgacgcgctgcgcaggttcaccc

SEQ ID NO: 246 - DNA, 401 bp, Mycobacterium tuberculosis H37Rv
tgggcctgacaccgcttgagggcttggtgatgggcacccgcagtggcgacctggacccgggcgtcatcagctacttgtggcgcaccgcgaggatgggtgtcgaggacatcgaatcgatgctcaaccatcggtccgggatgttggggttggcgggggagcgggattttcgccgtctacgactagtgatcgaaaccggggacaggtcagcacaattggcgtatgaggtgttcatccaccggttgcgcaagtaccttggtgcctatctggcggtgttgggccacaccgatgtggtgagctttaccgccgggatcggcgaaaacgatgcggcggtgcggcgggacgcgttggctggccttcaggggctaggtatcgcactcgaccaagaccgcaacctgggcccg

SEQ ID NO: 247 - DNA, 401 bp, Mycobacterium tuberculosis H37Rv
gaatacgggctgccgcaatagggacaccagccctctgaagctcccttggtctccgagtcggaccggccgacgggacgtccacagttccagcagaaccgcttggactccggcaccaccgggttggtcatcagggcctcaagcggatcgatatcgggcgcccgcgggatttccaccaggccgccgcccagccgtctgaccggcgggcgcacccggctggtggtggccatccggtcttgcggctcggtgtccgggccgagcgtcggatgggggaagttgtcctcatcgccgaaatcggggcggaacaccgcctgggtgctcaggggtcgaaccgtcgcggacgtcgcggtctgggcgtccgccggttgggtgccggggcccgaacgttcggtctctgacgcttt

SEQ ID NO: 248 - DNA, 401 bp, Mycobacterium tuberculosis H37Rv
ccgagcgcgacggcaatggcggcacctaagctgagcaccacgccgcccacctgcgcgcctgccagcccgcgatgcgcattgaggatgtcgtggcgcagttgggtgcggctttgtcccatggctttggtcagtgcttcgtcgagcttgtcgaatgcgggggtagcatcgtcctcgcctttacccagtgccacctgagtggcagcccgatagttgccgacggagatgtcggaattgatccggtcgttggcctgccgccagcgcaccaacagctggtcggcgccctgcagatcgggtttgtcgacggcgtggcggcgggccatgtagtcgttgagctggcgttgcatggcgtcgatgcgctgatagaaggcctgcttgcggacctcttcgtcgccgcgccggat

SEQ ID NO: 249 - DNA, 401 bp, Mycobacterium tuberculosis H37Rv
gcacgagtcgctggtggtggccgtcgaccgggccgacgtcgccgacctgcgcactgtcgcggactggttgtccgcacaggggcacccggtgatctgggagtcggctgcccgtgacgtcgaacccctactggcgcaaggcatccggcacgggtttcgggcgcccaccgaactggccgtcgacaaccgcgccctgctcgacgcgctgtgccgtgactgcgagcgactcggagttcgctggagctcacaggtgagcagcctgtccgacgtcgatgcgcacacggtggtgatcgccaacggcattgacgccccggccttgtggcccggcctgccgatacgcccggtgaagggtgaggtgctgcggctgcgatggcgaccaggttgtatgcccttgccgcagagag

SEQ ID NO: 250 - DNA, 401 bp, Mycobacterium tuberculosis H37Rv
cggacgggctcgaccacgtgctcgccggcatcatcaccacccgagacccggtgatggaagccgatgcggaaaacgacgacgaacatgggtcggccttggatcgggtcagcgcgttccagctgggcttcatcaacggcacgccggcgtgcgcggcgatcgacgaggacgaagtcgagcggcgccgcggtgacctgccgacggcgttgcgggtcgatgccagcggcaacccagagaccggcgaggtcggaatcaacgaagagaccctctcgacgttgatggagttgatgggcaagatcttctcgccgaagaatccgcccacgctgtcctaccagccggccggttgcccagacgccaagcccagcccaccggccgcctactgtccggccaccaacaccatcgtg

SEQ ID NO: 251 - DNA, 401 bp, Mycobacterium tuberculosis H37Rv
ccagggcctgagtgttgtcgttgccgtcggcgtacagcgcctgggtgaggttggagcgccagccgctgccacaggtgaccttgatgccatacgcatcgtattgatccaggtagaccggaaaccacagcgccatcagaccaatgaccgccagcagcaggccagtaattccgatgaacatctggcgacgattcacggcttctccatgtcttgcgatgtgcattcgggattcgggcgccgcagcgctcgcgtcatgcaagcgcaaatgcgggctttgccaacaaaggccgggtggccacgcccaggcaagttgtgagggaggccccccggggccgcaaccatgttaacgcgcgtccgcctaagcattcagcgcgccgtgccctaccggcactacgcccgggcgt

SEQ ID NO: 252 - DNA, 401 bp, Mycobacterium tuberculosis H37Rv
gccaaagggattggggttggtcggccggttcgtcggcgtgcagcgcgagctgtggttcatgccggcgccaggctctggctccggcacggcattccgcggctttcagcgcctggatcgtcagatccaccgacaacgccgccggcgacagcgtgaccgtgtgtgcggcggccatggccagctcaaggacggtggcggtcgcctccgtgcctattcgatcctcgagtaggcggcgcagcaacggctggtggtccacggccgccaccgctgcctcgatgacgagcggaaatcggggccagcgcagcgcccggccgccgagcgctaagcccagcccggccgcggtggcggctaccgttacagctctgaccgccagcagcacgccgtcgcccggcaggctccccggt

SEQ ID NO: 253 - DNA, 401 bp, Mycobacterium tuberculosis H37Rv
cacgtgcgaccgccacacccaggtagctgccgaatgccaactcgccgtcgatgacgggggtcgccatgtcgaggggtaggcgttggtggtagagccgcagccaggtgtcgtcggggtggtccagcaacgtgaccgaccggtcgggttcaccggtggacacgtcacgcaccaacacttgctctcggcgctcacctgccaggtcggccggtagtggcagcaagcggtccgggacggccagccatggctgcagatcacggctcgcataccatgcgctgatttctgtgatggtgttcgtgtgtgccgagatatccagcggtactgctgaattagcggccagtacggccccgtgtccggctcgcaggagccagccgtccagccaggttcgttcaacgccgggccag

SEQ ID NO: 254 - DNA, 401 bp, Mycobacterium tuberculosis H37Rv
acgggggtcgccatgtcgaggggtaggcgttggtggtagagccgcagccaggtgtcgtcggggtggtccagcaacgtgaccgaccggtcgggttcaccggtggacacgtcacgcaccaacacttgctctcggcgctcacctgccaggtcggccggtagtggcagcaagcggtccgggacggccagccatggctgcagatcacggctcgcataccatgcgctgatttctgtgatggtgttcgtgtgtgccgagatatccagcggtactgctgaattagcggccagtacggccccgtgtccggctcgcaggagccagccgtccagccaggttcgttcaacgccgggccaggccgccgcggcggcgtgttcaagtgcgcggatcgcggcggtgcgcaccggcgc

SEQ ID NO: 255 - DNA, 401 bp, Mycobacterium tuberculosis H37Rv
gcaatcgtagacgaagagccgcaggctgcagccgatctggttggcagccaggccgactccgttggcggcgtccatggtgtcgtacatggtggcgatcaactgggcgagatccgccgggagtgaaccgtcggcggcgaccgtcaccggtgtggtcgcagtgtgtaagacgggatcgcccacgatgcggatgggtacgactgccatggtgggctagcttaagcgcgccgacgatacgcgccgcgaggcggcgggctgaggaggcgggcaatcggcttaggcgcgccgcggggcggcgggcatcatcgccgggtgtgaaccacacgacggctggccggcatgtcgcgtcgcaggattcacactcggagcatgagccggcgcgccgcgatcggcagtcgggtgca

SEQ ID NO: 256 - DNA, 401 bp, Mycobacterium tuberculosis H37Rv
cgcgccagtcggcagaaggcgcgggccgcgcgacgccttggcttcgaggtgacctgacactctccccgcttttgccggttgtgtcccggtgctggttacagtgggctcgatgaatgagcgtgtacccgactcttccgggcttcccctgcgggccatggtgatggtgctgttgtttctcggcgtcgtcttcctgctgctcgtctggcaggcactgggttcgtctccgaactccgaggacgactcgtcagcgatttccaccatgaccaccaccactgcggcgccgacgtcgaccagcgttaagcccgcggcgccccgggccgaggtgcgcgtctacaacatctcaggcacagaaggcgccgccgcgcggacggccgatcggctcaaggcggccggtttcacgg

SEQ ID NO: 257 - DNA, 401 bp, Mycobacterium tuberculosis H37Rv
tgcgggccatggtgatggtgctgttgtttctcggcgtcgtcttcctgctgctcgtctggcaggcactgggttcgtctccgaactccgaggacgactcgtcagcgatttccaccatgaccaccaccactgcggcgccgacgtcgaccagcgttaagcccgcggcgccccgggccgaggtgcgcgtctacaacatctcaggcacagaaggcgccgccgcgcggacggccgatcggctcaaggcggccggtttcacggtcaccgacgttgggaatctatcgttacccgacgtcgcggcgaccacggtgtactacaccgaagtcgaaggcgaacgggccaccgccgacgcggtaggccggacgctaggagcagcggtggagctgcgactgccagagctgtccgac

SEQ ID NO: 258 - DNA, 401 bp, Mycobacterium tuberculosis H37Rv
aagcccgccgatcaccgcaatcacgcagctgtcagcacgtcggtcctgtccgcgttgtttctgggcgccggtgccgcgctgctgagcgcatgctcgtcgccgcagcacgcgtctacagttccgggtaccacgccgtcgatttggaccggatcgcccgcgccgtcgggactttcgggtcacgacgaggagtcgcccggtgcgcagagcctgaccagtaccctgacggcgcccgacggcacgaaggtagcgaccgcgaagttcgagttcgccaacggctatgccaccgtcacgatcgcgacgaccggcgtcggtaagctcacgcccggcttccacggcctacacatccaccaggtgggtaagtgtgagcccaactcggttgcccccaccggcggtgcgcccgg

SEQ ID NO: 259 - DNA, 401 bp, Mycobacterium tuberculosis H37Rv
gatctggaccgccgcttggacgccggcgaaacgctaccgaccatgcctccctggcacgtccaggagaacaagtggcgtgccgcccgctacggcctggacgcggtgatcatcttggacgccgacagcaacgaacggctggttaccgatgacctcgcggatgtgctgacccggctggagccggtcgccaagtcgctgaactgtgccgacgagcttgccgcggtctccgatatctaccgcgatggcgcctcctaccagcggcagctgcgagtggcgcagcagcatgacggcgatttgcgcgcggtagttgacgcgctggttgccgagctggtgatttagccgatgcgggctggctgagtgtgacgtccgccagccgcgaggagattgaggtttaggtgatggcc

SEQ ID NO: 260 - DNA, 401 bp, Mycobacterium tuberculosis H37Rv
cggctgcccagctgctggaagtcgaagaccgggttgtggcgctattcgagcggatcgctgccgcccggggagttcggctgccggcccgtgaggtggtattgggctacccggtggttgacccagccgataccgggcagcgtctgtacgcgctggcatgtcgagtgccgatgggcccggccgatcggtacgccgtgctggcgacgccgtcggcggccgatcgattggtccgcttgggtgacgcgctggactcggtggccgcgatggtggagttcgagttgtcgacgtaactgccctacgcggtgcgtctgacccactgggcctgaaccacattcactgcgccgagcaccatatacggacccgtcaccgccggcaagcgcatccgggtgcggaaccggctcgac

SEQ ID NO: 261 - DNA, 401 bp, Mycobacterium tuberculosis H37Rv
cgcccggcgggaatgtcctcggcgaccggcaacatcaccggattttgcggtgtggcacctgaggtgtcttcggcgcgcaccgcatagccatccattgcggagttgtcgaaaaccggcagcgacagcggtgcgaccacgtcgccgcccaggaccagaccttgagcctgggtcagcggaaccgtaatcgggcgacaggcgcgcatcatctccgctacgacacgttgatgctcctggactgaccgcacccggccattatcggtcgttcagactccgaagctgacgccggtgagttcttcggagacggtccagaggcggcgctgcagatctttgtcgtgggactgcgcgctggattggaccaccttcgggtgaccgcgctgctcgccgaacccgtccgggccgta

SEQ ID NO: 262 - DNA, 401 bp, Mycobacterium tuberculosis H37Rv
ttgcggacggccaacactacgtgtgcaccgcggtcggcaaacacggcggcggtgtggtagccgatgccggtgttggcgccggtgaccacaacgacgcgcccgctttgatcggggacgtctgcggccgaccatttacgggtcttgttgtcgttggcggtcatgggccgaacatactcacccggatcggagggccgaggacacggtcgaacgaggggcatgacccggtgcggggcttcttgcactcggcataggcgagtgctaagaataacgttggcactcgcgaccggtgagtgctaggtcgggacggtgaggccaggcccgtcgtcgcagcgagtggcagcgaggacaacttgagccgtccgtcgcgggcactgcgcccggccagcgtaagtagcggggtt

SEQ ID NO: 263 - DNA, 401 bp, Mycobacterium tuberculosis H37Rv
actgggttgcgacggccatcatcgccgccgcggacggacccagccaggcgccactagtcagttcggatgtgacggagccaagcgacgctattgacgcgagcaatttttcggccagctcgccccaggcggtggccgcagcaattagcggtcccgacccgggaccggcaaacatcagtgccgaattgatctctggcggcaaccacgcaaaatgcgggcttgtcactgatccaacttaactgtcagcgaccgttgccgtggcggtatcggcacttcaataccactcatctttggggtcatctttggagcgcccctaggaaccgccagcttacctagtcccgggtaggggccgactggcggccgggatgcagctgagggtctgccacctgccccgtaatgtcgct

SEQ ID NO: 264 - DNA, 401 bp, Mycobacterium tuberculosis H37Rv
caccattgtcgcgccgagactgcggtgaggggccggggtgtgcgtcctcggctcacccgagcggcagctcggccaagatggtaccggtgggctgtggtgatccggtgccgggttcgacggtgaatgccagtgcggtcgaggctccgagatcggtcagcgtcgccgtcgtcgagggcgtcaccgccgcggtgcccatcgtccccgccgacctcggccctttggcccctcccagcagccacatctgatacacggttccccgggatggtggcgccacattgttcatcaccagcagacctgtgttgcggtcgcgggagaacaccaccgtggccgtcccggcgcccagtgggcgagagaccgtccgtacgtccggcgccgtcagaacttgctcggccacggtgggg

SEQ ID NO: 265 - DNA, 401 bp, Mycobacterium tuberculosis H37Rv
gcagccacatctgatacacggttccccgggatggtggcgccacattgttcatcaccagcagacctgtgttgcggtcgcgggagaacaccaccgtggccgtcccggcgcccagtgggcgagagaccgtccgtacgtccggcgccgtcagaacttgctcggccacggtggggggtggcgatggccgggtcagcacccccaggccgaacgcccccagccccacagcgatcgccgctgcggacgcaaaggctgccgtacgccagcgtgattggcgcctaacctcgggcttggtcgcatccaggatggccgtccgcagatgtgctggcggctcggcggtggtggccgccgagacgacggccatcgtctcgcggacggctcgaacttcgtcgttgaaagccgcggct

SEQ ID NO: 266 - DNA, 401 bp, Mycobacterium tuberculosis H37Rv
tcctgggtggtttcttcgctgtagccggtatcacgcagcacccgcatcaccagtccatacacccgcgacttggtgtggtcgtagaattcggcgaatgcggcctggtcgtgaccagcgacccggcgcaacagggcgtccaggtcgctgctcagccgtggcggtccggtcatcgatgggtagcctatcgccagccggcgccgtgatggtcaagccggtcatcaccgacgcgccgatcgcggtggccggggcacgaaataggctgttcgcctttgatattcggcgaaaccggggcgacccttcaggtatctctcagtcagccgggctccgctgacgtccaccagcaggtaggtcatcagcagcggcgaacccaccgtggccagcggcgcccagtcgttgatcgt

SEQ ID NO: 267 - DNA, 401 bp, Mycobacterium tuberculosis H37Rv
tcgctgagcttgtcgattccgtccagtgcatcgaatatcgatctgaacgaccaacagatcggaattccgtagcagtgcttttcccagtagaaatagcttcgaattggtctccagaaatcatcaaaatccgcgacgtggtcgcgtaattcttcggtgatctccttcatctcttcggtgtcgccgaccatgcggtgggtagtactggccatctccgccatcaagctatgcatccgcgtcaacaccgcaatcgtcgtggccatctcgtcggcctgcttcagcatgtcgttcgcccggtcgcgctggtactttatggtctgcagctgaccggcattttgcatgctgatctggaacgggatcgacgtgtggtccatcgtcgttccttcgggccgggtaattgcttg

SEQ ID NO: 268 - DNA, 401 bp, Mycobacterium tuberculosis H37Rv
gtccagtgcatcgaatatcgatctgaacgaccaacagatcggaattccgtagcagtgcttttcccagtagaaatagcttcgaattggtctccagaaatcatcaaaatccgcgacgtggtcgcgtaattcttcggtgatctccttcatctcttcggtgtcgccgaccatgcggtgggtagtactggccatctccgccatcaagctatgcatccgcgtcaacaccgcaatcgtcgtggccatctcgtcggcctgcttcagcatgtcgttcgcccggtcgcgctggtactttatggtctgcagctgaccggcattttgcatgctgatctggaacgggatcgacgtgtggtccatcgtcgttccttcgggccgggtaattgcttgcacacgggaaatgcccggga

SEQ ID NO: 269 - DNA, 401 bp, Mycobacterium tuberculosis H37Rv
cacggtacccacccgccgccagccacggactttgaggagccgcttagggtcgaacaggccgaaccggctgccgacgtgtaggacggccggacccagcgtcaacgcgaccgccactgcgactagcatccccaccgcgcaggggatgcccagggtttgaaagtagggcatgcgggcaaagctcaggcaaaaggtagctccggcgatggtcaatccagagcccagaatcacgtgggcggtcccgcggtacatggtgtagtaggcggcctctttgtcctcgccggcttggcgggcttcctggtagcgcccgatgatgaatatcccgtagtccgtaccggccgcgattgccagcgaagtcagcaagctcaccgcaaaggtggtaagtccgatagccccgctatgcc

SEQ ID NO: 270 - DNA, 401 bp, Mycobacterium tuberculosis H37Rv
agttgcaaacgatagtcatagtcaattgttgccagacgcacagctggtgttggcgggagtcgccgatagaggagtgttcgacatgacgttgcacgtcggtgccgacggcctagagaccgcaactacggcgcgcgccgtggcggtcgctaggtccggaatggattgtgtggccggtgatgcgtcaggggcgacttcgtgcctacgcggtgagctatgacgagcgcactgatatggatggcctctccgccggaggtgcattcggccttgttgagtagtgggccggggccggggccggtactggccgccgccacagggtggtcgtcactgggccgtgaatacgccgcggttgctgaggaactcggggcattgctggctgcggtgcaagccggggtgtggcaggg

SEQ ID NO: 271 - DNA, 401 bp, Mycobacterium tuberculosis H37Rv
attcgtgccagctcggtggcgatctcggcgacgcgagcctcgagccgctcgaacggcaccgcctcgttgatcagctcggcttcggcggcctgcacaccggtcagcggccggcccgtcagcgagtgccatttgaccttggcaaggctgagtcgatacagccacatcccggtcaaataggctccccacatgcggctatacggagtcccgatcacggcgtcctcgctggcgatcacaatgtcggcacacagcgcgtagtcgctggccccgccgacgcaccaaccatgcacttgcgcgatcaccggtttggacgcccgccagatggccatgaatttctgcgtcggtccggtctcccgcgcggtgaccatggcgaaatccttgcccggatcccatcggccgtcggt

SEQ ID NO: 272 - DNA, 401 bp, Mycobacterium tuberculosis H37Rv
accgggcggcccggagctcaacggtgcgggccacccacaggtagttgcggccgtcgggcatctgggcgatttgcaccaagatcttccccgggttggcaaacgtttcgtagacgttccacagcgggcaggtgccgccgctggaggagaagtgaaagccggtggccgactgacgttttgacatgtttcccgctcggtccacccggacgaaggtgaacgggaccccgcgcatcgaaggccgttgtagtgtcgacagccggtgggcgatggtctcgtagctcaccgagtagaacgccgacagccgctcgacgtcgtagcggaaattctcggcgacgtcgtggaactggcggtagggcagcacggtggccgcggcgaagtaattagccaggcccagccgggccaac

SEQ ID NO: 273 - DNA, 401 bp, Mycobacterium tuberculosis H37Rv
ccgcatctgggccgtgaggtcttcggccgcggtgtccagcgcatgtagatagttctggcgttggtagaagtagtcgcgcacctcttcgtgcggcatggtgatcgaccctcggccactgccgtcggagaaccgctcctcggtcgcggcggccagctgcgcggtggtgatccggtagcgccgatgcaggttgaccaccgcgcaggccagcccgggatgagcgctgaccatttcggccacttcatgcgggtcgatggcgatgtctagatcgcggtccagggtcacctccctgagttcggcaaccagccgggtgtcgtcctgggaggcaaagaacgtcgcgtccaccccgaacacttcggtgatgcgcagcagcacggccacggtcagcggccggacgtcgtgtt

SEQ ID NO: 274 - DNA, 401 bp, Mycobacterium tuberculosis H37Rv
gggatgagcgctgaccatttcggccacttcatgcgggtcgatggcgatgtctagatcgcggtccagggtcacctccctgagttcggcaaccagccgggtgtcgtcctgggaggcaaagaacgtcgcgtccaccccgaacacttcggtgatgcgcagcagcacggccacggtcagcggccggacgtcgtgttcgatctggttcagatagctcggcgagatctccagcatctgggccagcgcggcctggctgaacccgcgctcgttacgcagttggcggacccgcgagccgacgtaggtcttggacacccaaccgagcgtaccgggtgttgtgaagacgccattcgcagagttagcaagcgtgctgcgattggtgtttccgccacggcgttggcatgattcgc

SEQ ID NO: 275 - DNA, 401 bp, Mycobacterium tuberculosis H37Rv
tgcgctcggcgacaagctggagatcatctcccacgttcacccggctggttcgaccgagatattcggcccggggttggtcgaccgcgctgttacaacgctcacatatgtggttggcgacgagcccaaggcagtcgcctcgctgttcaatctgtgaccggatccgcaggacgtcgatccgtgggtttacctgcggatttgtcgttactggcgggtagcttctgaaacggttcagtttttgggcgacttcgcaaaatttgcaaaaagtccgcaggccgttgccgaaattcgcaagtgaaatgggtggaccagcgttgacacgctgtgccatggtcgagttagcacaccagtgaagctgcgccgttgacaccgcctggacgacggtagggcgtcagcgttttcgg

SEQ ID NO: 276 - DNA, 401 bp, Mycobacterium tuberculosis H37Rv
tttacaacaaatacatgcactatctgaccggatgtgagcacttcttccgcaagggcatcagcaacgtgggacagttcacactgaccaagtagcccatcgccgcccgagcaccccaggggttgcggagctcacgccgggtgtggcttgacgcccgggcaccggccggtgggtagccagcgcgctttgtccggttacttttccagtgtgaactggtcgacgtcggtgtaaccctggcggaacagcttcgcgcagccggtcaggtacttcatgtagcggtcgtagacagtctgcgactggatcgcgatggcctgatctttgttggcctcgagcgctgtggcccacatgtccagcgtcctggcgtagtgcagctgcaatgactggaccgcggtgacccggaagcc

SEQ ID NO: 277 - DNA, 401 bp, Mycobacterium tuberculosis H37Rv
agccagccaccggggaagatctcggccaggatgaatttggtgaagtgaaccagttcgtgggtcaacgtcaggcccttttccctgccttctttgaaggtggggcgcacgatggtgtgcagcaacatcttgccgtcggccggcaacgtgcggtgggtcacctcgaagaaatggtggtagcgctggtggccgaagtgctcgaacgcgccgatcgagacgatgcggtcgacgggctcgtcaaatttctcccatccctccagcaacactcgtctggagcggggggtgtccatttggtcgaacattttctggacatgaccggcctggttctccgacaacgtcaggcccacgacattgacgtcgtatttctcgatggcgcgccgcatggtcgcgccccagccgcagcc

SEQ ID NO: 278 - DNA, 401 bp, Mycobacterium tuberculosis H37Rv
caatagcaagcacttggacgtactctggtggccgttgcaccgatcaccccgagctaggagtagccaatgtcgtcggaggagaagctggccgccaaggtgtccaccaaggcctccgatgtggcttccgacatcggcagcttcatcaggtcgcaacgtgagacggcgcacgtctcgatgcggcagctcgccgagcggtccggcgtcagcaatccgtacctgagccaggttgagcgcggattgcgtaagccgtccgccgacgtgttgagccagatcgcaaaggcgctgcgggtctcggccgaagtcctttatgtgcgcgccgggattctcgagcccagcgagaccagtcaggtgcgtgacgccatcatcaccgatacggcgatcaccgagcgtcagaagcagat

SEQ ID NO: 279 - DNA, 401 bp, Mycobacterium tuberculosis H37Rv
tccgccgacgtgttgagccagatcgcaaaggcgctgcgggtctcggccgaagtcctttatgtgcgcgccgggattctcgagcccagcgagaccagtcaggtgcgtgacgccatcatcaccgatacggcgatcaccgagcgtcagaagcagattctgctcgatatctacgcgtcatttacccaccagaacgaagccacccgggaggagtgtccgagcgatccgacaccgaccgatgactagccgttggccggctgttttgcgcaccggctggcgggtaatcaaacctgaaggacagtcatctgggtgaggtcgaccgcaggctgatccagccgatcggccgcgctggccaacagcgactccgtcgatgacgtgcagcaaaggagacatgtagtgaccggatc

SEQ ID NO: 280 - DNA, 401 bp, Mycobacterium tuberculosis H37Rv
gctgatgcctggtcgcggggccggatgacgatctggtcaaggttgacgtgtgagggccgggtggccacgaatccgatcacctcggcgacgtcggcggctactagcggtgtcatgccggcataaaccgcgtccgcgcgttgctggtcgccgtcgaagcggaccagcgaaaattcggtctcgaccgcacctggagcgatctcggtgagccggaccggcttccccagcagttcgccgcgcagcgtgcgatgcagcgcgccctgcgcgtgcttggcagcggtgtagccggcgccgccgtcgtacacctcgatcgcggcgatcgaggtgacggtgacgatcaggccgtcgccggagtcgatcagcttgggcagcagcgcgcgggttacccgcagcgtgcccagtac

SEQ ID NO: 281 - DNA, 401 bp, Mycobacterium tuberculosis H37Rv
tgtcatgccggcataaaccgcgtccgcgcgttgctggtcgccgtcgaagcggaccagcgaaaattcggtctcgaccgcacctggagcgatctcggtgagccggaccggcttccccagcagttcgccgcgcagcgtgcgatgcagcgcgccctgcgcgtgcttggcagcggtgtagccggcgccgccgtcgtacacctcgatcgcggcgatcgaggtgacggtgacgatcaggccgtcgccggagtcgatcagcttgggcagcagcgcgcgggttacccgcagcgtgcccagtacgttggtgtcccacatccatcgccagtgctccaaatcggcatcggcgacgaactgaagccccttggcgccaccggcgttgttgaccagcacgtccacccggctcagcg

SEQ ID NO: 282 - DNA, 401 bp, Mycobacterium tuberculosis H37Rv
gccgcgcagccggcccgtcgcgtcgaccggacaaagctgctcgtcggcgccggcggccgcggtgcccgtcggatggaaggcggccaggtgcaggcttctggggttggctcggcgcagcacatcctgcagctcgggcagggaccgcatcggtggggcgccggggataccggtcagcacctccaccgcgccggcggcaaagagcagccggccaatggcctgcagcgcgacccgtagcttggcgatctcacctggagctatgtcatagcgcaccaccgtctcgccgcgcaccgaccgcaccgtgccgacgccccgatcggccaccatcgccccgaatgttgcgatctgcggcgcccggtcgagccagcggagcagctcggccccgtagccggggaagaccatcg

SEQ ID NO: 283 - DNA, 401 bp, Mycobacterium tuberculosis H37Rv
gaccccatgcccggcggtgtggaggtggcctcgatcagcacgccgtcggattcgtgaaactcgtgaaccgccgcgctctgcagcaccccgcgccacgcgaagacgtcgtcgtcgaagagcccggccagcatagttgccgggtgcagcgcaaggttgtggcccagtcgcgggtgcccaccaagaccgctgcgccgcaacagtcctggcgtctccgtcgcaccggcggcgacgacgaccgcgtcggccagcacgtcgagtgtggtgccgtcgggccggcgggctcgcacgccataggcccgcccggcgcggtgcaggatccgttcgacccgcgcccaggagatgatccgcgcgccggccgcgcaggcttgcggcagggcgttgaggtgcacgccgaacttggc

SEQ ID NO: 284 - DNA, 401 bp, Mycobacterium tuberculosis H37Rv
ggcggcatcgcggcggtccacgggcaggcgtcgctcgatgagcactccgcagacaaacagcagcggcgggtcgagcaggaaactcatgctggcgtcccttccttgatagccggtgccgcggttccccgcaggccgacttcggcgtgtccggtgcccagcaccgaccagtgccggccgccgagctcgatgtggatgtcggcctgctcggtgttggtgcacaccgccttggccccgtcgggatcggtgtatcccaggcttacgcaccgctccggcggctggtctacccggattagcgcctcccggccgccgatgcgtccttccagttgccagtgccgcacgccgagcgttgtccgcattcgcagcgacggtaaaggacttgcgggccaatcctttccgtcgat

SEQ ID NO: 285 - DNA, 401 bp, Mycobacterium tuberculosis H37Rv
cattcgcagcgacggtaaaggacttgcgggccaatcctttccgtcgatgcggaagcgaacgaacgctagcggcgcgagcctgcgtaggcccggcttgtgtgataccgcggtcaccacctctaggacgtcgccgtcgccgagatcggcatggatccatccccaccgcttggcattgccatgtccgtagatgtgggccacactgccgcgccagctgtcgacgcggtgggtggtttcgccgacggccaaggagccagcgaagacggcggtgggtgcgatcaccacttgggcgccgggcagcaactcgcgctcccaggccacgcgaggaaacgtccacagtggcgccgcggtgtccttccaggacagctcccatgcgagtgatcgggtacgtccggtcagctccg

SEQ ID NO: 286 - DNA, 401 bp, Mycobacterium tuberculosis H37Rv
gccgcggtgtccttccaggacagctcccatgcgagtgatcgggtacgtccggtcagctccgctggcgccattcgtacaccggcgatgtcgaaccaggcggggccggccgcgggttgggcgggctgggggccgaagcgctcggtgcccggcggggcatccggtggaaaccaggtcacccagccgtgcgcgtagggcccgccggtcgtcggggccaccgtctcacagtgcacccataggccggtacgcgtcagtggatccgacagagtcgcataccagacttccaggcgcccggctgcaccgcgccaccgcggcaaggccgccgaccgcgtttcatcgtccactgcggcacctcctgctggctgagttgtcgattcgcccactatattggttgagccaatgaa

SEQ ID NO: 287 - DNA, 401 bp, Mycobacterium tuberculosis H37Rv
gtcggcggcgtgctgaccgttccggaatcgcagttggacgcggtgaccgcggtgtccggctcgggtccggcctatttctttctgctggtcgaggccctggtggatgccggagtcggggtgggcttgagccgtcaggtggccaccgatctcgccgcgcagacaatggctggctcagcggcgatgctgctggagcggatggagcaagaccagggtggcgccaatggcgagctgatggggctgcgcgtggaccttaccgcatcacggctgcgcgccgcggttacctcgccgggcggtacgaccgccgctgcgctgcgggaactcgaacgcggcgggtttcggatggctgtcgacgcggcggttcaagccgccaaaagccgctctgagcagctcagaattacacc

SEQ ID NO: 288 - DNA, 401 bp, Mycobacterium tuberculosis H37Rv
cggtatcgatgagccccagcgacgccgcatcgattcaggcgatcaagcgcgttggtcaggtgttcggtgagtttgattccgataacgcggtaacgatcgtgctggaaggcgaccagccactcggtggggacgcgcaccggttctatagcgatctgatgcggaagctttccgccgatacccgccatgtcgcgcacatccaggacttctggggggatccgctgacagcggcgggatcccaaagtgcggatgatcgggccgcctacgtcgtggtgtacctcgtcggtaacaacgaaaccgaagcgtatgactcggtccacgcggtgcggcacatggtggacaccacaccgccaccgcacggggtgaaggcctatgtcaccggtccggcagcactcaatgccgac

SEQ ID NO: 289 - DNA, 401 bp, Mycobacterium tuberculosis H37Rv
accacgatatgcgtaatccggtggacatgctggtgttggacaaggtagccaaaaatatctaccacagtcccggtattgaacaagtgaaagcgataacccggcccttgggaacaaccatcaagcacacttcgataccgttcatcatcagcatgcagggcgtgaatagtagcgagcaaatggaattcatgaaggaccgaattgatgacatactggtgcaggtggccgcgatgaatacctccatcgagacgatgcatcgcatgtatgcactcatgggcgaggtcattgacaacaccgtcgacatggatcatctcacgcatgatatgtcggacataacggctacgctaagagatcatctcgcggatttcgaggatttcttccggcctattcgcagctacttctac

SEQ ID NO: 290 - DNA, 401 bp, Mycobacterium tuberculosis H37Rv
ggagaggaataacaaggaccccggcgcgatgggccgggtttttgacgccgcccagatcgatgattcgttctatctgccgcagtcggcttttgagaatccggatttcaagcgggggctgaagatgtttttgtctccggacggcaaggcagcccgctttgtcattgctctggagggagatcccgcaacgcccgagggcatctctcgggtcgagccgatcaagcgggaggctagagaggccataaagggaactccattgcagggcgctgcgatctatctgggtggcaccgcggcgacgttcaaggatattcgagagggcgccagatacgatctgctgatcgccggagtggcggcgataagcttgattttgatcatcatgatgatcatcacccgaagtgtggtag

SEQ ID NO: 291 - DNA, 401 bp, Mycobacterium tuberculosis H37Rv
gtgttggcgatgtcggtgatcctgctcctggcggtgggatccgactacaatctgctgctgatttcccggttgaaagaggaaattggggccggattgaacaccggaattatccgtgccatggctggtaccgggggagtggtgacggctgccggcatggtgttcgccgttaccatgtcgttgtttgtgttcagcgatttgcgaattattggtcagatcggtaccaccatcggcctgggcttgctgttcgacaccctcgtcgtgcgctcgttcatgacaccgtccattgctgcgctgctgggacgctggttctggtggccgctacgggtgcgcccgcgcccggccagtcagatgcttcggccgttcgcgccgcgccgattggttcgcgccttgttgctgccgtc

SEQ ID NO: 292 - DNA, 401 bp, Mycobacterium tuberculosis H37Rv
agccgcgatccgggacggtttggacgccgccggctacatcgatgtggtgatcttggcctacgccgcgaagtttgcttcggcgttctacggcccgttccgcgaggcggtgagctctagcctgtccggggatcggcgcacctaccagcaggagccgggcaacgccgccgaggcgctgcgtgagatcgagctcgatctcgacgaaggcgccgacattgtgatggtcaaacccgcgatgggctacctcgatgtggtggcggccgcggcggacgtctcgccggtcccggtggccgcctatcaggtctcgggagagtacgcgatgattcgtgcggcggcggccaataattggatcgatgagcgtgccgcggtgctagagtcgctgaccggtatccggcgtgccggcg

SEQ ID NO: 293 - DNA, 401 bp, Mycobacterium tuberculosis H37Rv
cacgtcggtcacgtgccgtctccggaggcaggccagctgaccgcgatcagctatgtgcgccagatcctgctggtgcagctgtggtttcagccgtatttcgatggatccagttgggatggaccggcctggtcgatcagtgcggaatggttggcctacttgctgttcggtctgctcattctggtcatcttccggatgaagcacgccaccagggcgcggggcctgatgtggctggccttcgcggcgtcgttgccgcccgtggtgctgctgttggccagcggccagttctatacgccatggagctggctgccccgaatcgtgacgcaattcgccgcgggagcgctggcgtgtgccgccgtccgcaggttgcggccgaccgatcgcgctcgccgcatcgccgggta

SEQ ID NO: 294 - DNA, 401 bp, Mycobacterium tuberculosis H37Rv
gacgcggttgatggtttttggcgggcagatctcgttttgcctctacatggtgcacgagctggtgcataccgcctggggatgggccgtgcaacaatacgagcttgcgctgcaggatcagccgtggaaatggaacgtcgtcggtctgctcgcgatcgccctgggggctgcgatcttgctgtatcacttcgtcgaagaaccgggccgccgatggatgcgccggatggtcgacgtcaaagccgcgagtgcgagaagcgagcccggggagccggtaggcagcacgcgttatcaaatcgacgatgcgctggaaggggtttcggcccgcgcggtgtgacggttgagtggggctgcagcgggtcgacgcgagttcacatcggtttcctcgtacgattccctttatttgg

SEQ ID NO: 295 - DNA, 401 bp, Mycobacterium tuberculosis H37Rv
taggacgccatccaagccagttcgccgggcaactgttcgcgccagtacgacgcgtcgtgtcctccgggcgagaagctgccggcaggcggttggtgcagttggttgacgaattggcgagtggcgaagtagaagcggtcgctggtgccgcaatccacccgtagcgggattgagttcagcgcgggcaggcccaacacgctgtgttgcacatagtcgtcgtagctgtcgaacgccccgggtgtgctgccggtgaacgacgtgaacaatgccgggctgatggcacagatccccgcggttctggccggacccaaccgggcacccaggagcagcgcgccgtatccccccatcgaccaccccaggaatcccacccgggaggtgtccatacccatcgaggtcagcatcgg

SEQ ID NO: 296 - DNA, 401 bp, Mycobacterium tuberculosis H37Rv
gaaacaccgactaggtcagttgcgggattccgcacccagcggctcgacccgacggcctacggcgcctactacagcggccccgatgagggcccggccagcccggctgaaaggccgccgtatcgtctcgagccggtgccccatacgccgtatccggaactggccaccaccacgctgctgaggccggtcaagccgccaccgtcggaaggctggcgtcggttgctctatctgctgtcgggtcggctgatcaacgccggggaaggccctcgggccgcgcacctcaacgacctggtcgctcaggtcaaccgcccgctgcgcggctgctaccggatcgcggtgttgtcgttgaaagggggtgtcggcaagaccacgatcaccgcgaccctgggggccacctttgccga

SEQ ID NO: 297 - DNA, 401 bp, Mycobacterium tuberculosis H37Rv
gccggtggtgctggtgggttgttgttcggtaacggcggcgacggcggcgtcggcggcgacggcggcgacggcagcagcacccaggattccggtggtgatgggggtgcgggtggggccggtggtgctggtgggtggttgcttggtaatgggggggccggcggggccggcggggccgcctcaatcaaggttgccactggtgggctgggtggtgatggtggcgatgccgggctgttcgggtttggtggggacggcggctggggcggacgcggagtggatgctcgattcggtgcggctgggggtgccgctggggccggcggtgcgggcgggtggttgtacggcgatggcggcgccggcggcgtcggcggtgtcggcggtgctgtcttcagcctttcctccggtga

SEQ ID NO: 298 - DNA, 401 bp, Mycobacterium tuberculosis H37Rv
ggcggcggtggccgcttcggcagcggcagcggtgccggtggtgatggggctgtcggtggggccggtggtgcgggcgcgtggttcggcaacggtggcgccggcggcgtcggcggcggcggtggccgcggcaccaccgccatcggtggcgacgggggtgccggtggggccggtggtgcgggtgggtggttgtacggcgacggcggcgccggcggtgccggcggcggtggtggccgcggcggcaccggcaacgatggtggcgacggcggggacggcggccgcggcggtgatgcccagctgcttggcaacggcggtgacggcggggccggcggggccggcgggcccgccgggttggcgcttcccccggggccggcgcggccggcgggggcggcggtgccggcggt

SEQ ID NO: 299 - DNA, 401 bp, Mycobacterium tuberculosis H37Rv
gcttgcgaacatagtctccgttccgacgacgcggcagtggcgcagaacacgcggttgggcggatctcgtttgcccggtgaccgtcccgctgtttgcgaacccggttacgctgcggtcataggcgaacgctgtcgccgaattaccgatactgccgacggtatcgcagtgtaacgatgccgggacattgctggttgtggggtagccagccgaaggagagccgcgatggacgtcgctttgggggttgcggtcacggatcgggtcgcgcgtctggcgctggtcgactcggctgcgcccggcaccgtgatcgaccagttcgtgctcgatgtggccgagcacccggtcgaggtgttaaccgagaccgtggtgggcacggatcggtcattggccggcgaaaaccaccg

SEQ ID NO: 300 - DNA, 401 bp, Mycobacterium tuberculosis H37Rv
accctgatggcccggctcggcgaccaggccctcgccccgggggatgtcttcctggtgggtaggtccgccgagcacaccacggttcttgccgaccagctgcgcgcggcgtcgacgatgcgcgtgcagactcccgacgaccccacgttcgcgctggcccgtggcgcggcgatggcggccggcgccgctacgatggcgcacccggccctggtcgcggatgcgaccacttcgctcccccgggccgaggcggggcaatcgggttctgaaggcgagcagctggcgtactcgcaggccagcgattacgagctgcttccggtcgacgaatatgaggaacacgacgaatacggggcagccgcggatcgctcggcgccgttgagccgacggtcgctgctgatcggcaacgc

SEQ ID NO: 301 - DNA, 401 bp, Mycobacterium tuberculosis H37Rv
atctgcggcggccaacaccgccatccccggcagcacgatcagcacgagcccgtagttgagaaagacaccccagccgagcagtagccccgctccggccgccaccagcgccgggaagcgagtggcaccatgcaccgccaccgccaacagggcgataccccacgccgccacaccggcgaaatacccgtcggccgaaaccgcgatccagatcgccgtcggcgccaccgcgacgaatggtgccgtccgccgcgccatctgctcactggccagcacccgcacggcgatcagcaccgccgccgccgcgctggatcccaccagcaggcacaccagccccgcccaaccgccaccgcgcagcccgatccgatccagccagacaaacgtcagcagcgcacccggcgggtgcc

SEQ ID NO: 302 - DNA, 401 bp, Mycobacterium tuberculosis H37Rv
gtccttgttcgccggctggagccaccacggcgatctgatccgttcacccatgcctgccacagtaatcatggccgctgggcgtcagccggacggtatggtgcccggggccttggtcacatgtggtcgtgagttggcgcccgggcggctttctgtggagggtcaccgcgtactcgatcatggcgctgctcgcagttcatcaccgaaccggcacagtgtcgctcggcaatgcggtctactcgtggggcatgttaagcgctcaacagggcggcgcgcccacctttctccaagccccgctggactcagccgatggcgtgagccgagggccaggcgcgtgccaatctttcgtcggtggtcaacaacaccagacctgccgtttcggccagctcgacgtagagggcatc

SEQ ID NO: 303 - DNA, 401 bp, Mycobacterium tuberculosis H37Rv
cggtgctcatctggcaagactagaacgtgttgcaatttggatctgccgtgccctcgtaatctcgaaggatcactacgcttggagcccatggccgatgcagacctcgtcatgaccggaaccgtgctcaccgtcgacgatgcgcggccaacggccgaggcgatcgcggtcgccgacggccgggtcattgccgtcggtgaccggtccgaggttgccggcctggttggcgccaacacccgggtcatcgatctgggtgccgggtgcgtcatgccaggatttgttgaggcacacggccatccgctactggaggcggtcgtgctgtcggaccggttcgtcgatatccgtccggtgacgatgcgggacgcggacgacgtcgttgccgcgatccgcggcgaggttgcacg

SEQ ID NO: 304 - DNA, 401 bp, Mycobacterium tuberculosis H37Rv
gcaacccgggtggcgcccagtggccgggtgctggcaccggaggagcgcctgacggtcgagcaggcgattcgcgcgcagaccatcgatgccgcctggcaactgttcgctgaggacgcgatcggctcgcttcaggtcggcaagtacgcggatatggtggtgctgtcggcggatccccggacggtgccgccagagcagatcgccgacctggcggtgcgggcgacgtttctggccggtcgccaggtttatcggcggtgatacccgtgctgccccccctagaagccctgctggaccgcctgtatgtggtggccctgccgatgcgagtgcgtttccgcggcatcaccacccgtgaagtggccttgatcgagggtccggccggttggggcgaattcggtgcgttcgtg

SEQ ID NO: 305 - DNA, 401 bp, Mycobacterium tuberculosis H37Rv
cgggctgagcagcagagttcgcacgccgtatgccgctacgcaaccatttcgacagccggcgctgacagtgtgtgtggcgtgcgcgttgcgatcgtcgccgagtcgttcctcccgcaggtgaacggcgtcagcaactcggtggtcaaggtactcgaacatctgcgtcgaaccggtcatgaagccctggtgatcgcgcccgacacgccgccaggtgaagaccgcgccgagcgacttcacgacggtgtccgggtgcaccgggtgccgtcgcggatgttcccaaaggtgaccacgttgccgctcggcgtgcccaccttccgaatgctgagagcgctgcgcggattcgatccggatgtcgtgcatctggcgtcgccggcgctgcttggctacggtggactccatgc

SEQ ID NO: 306 - DNA, 401 bp, Mycobacterium tuberculosis H37Rv
atcgcgcccgacacgccgccaggtgaagaccgcgccgagcgacttcacgacggtgtccgggtgcaccgggtgccgtcgcggatgttcccaaaggtgaccacgttgccgctcggcgtgcccaccttccgaatgctgagagcgctgcgcggattcgatccggatgtcgtgcatctggcgtcgccggcgctgcttggctacggtggactccatgccgctcggcggctaggggtgcccacggtcgcggtctaccaaaccgatgttccgggtttcgcgtccagctacggcattccgatgacagcacgggcggcgtgggcatggttccgccacttgcatcgcctggctgaccgcactctggcgccgtccacagcgacaatggaatcccttattgcccagggcattcc

SEQ ID NO: 307 - DNA, 401 bp, Mycobacterium tuberculosis H37Rv
ggcactgtcatccacgctcaccagtatgttggtcgagtgaggactccggcgacggtggtggcaggcgttgacctgggcgacgctgtctttgccgcggccgtgcgtgctggtgtcgcgcgagtcgagcaactcatggacaccgagctgcgccaggccgacgaggtgatgagcgattcgctgctgcacttgttcaatgccggcggcaagcggttccgtccactgttcaccgtgctgtcggcgcagatcgggccgcagccggatgccgcagcggtgacagtcgccggggcggtgatcgagatgatccacctggcgaccctctaccacgatgacgtgatggacgaggcccaggtccgccgcggcgcgcccagcgccaacgcgcaatggggtaacaacgtcgcgat

SEQ ID NO: 308 - DNA, 401 bp, Mycobacterium tuberculosis H37Rv
aggtatcggctattgcggtggttgtcgttgatgtcctgcgcggtgaccgccgagcgcacccactgcaaggttggtccgcggcgcgcacagatggaggcgacggtggtgccccaggaaccgccgccgaggacaacgactttgggttcgcgcttgttggctgccatggcgttcagcgtattgcggcaaccggacatttgatatccgtcgacgaaccgcaggagcaatcatgccgcgccgaacaccattgcctcctcgatgcggtcgaatcggtagtcgatggcgtcggccaagtagttctgtcgtacattccacggccgcttggtgccggacttgggcagcgcgtacggcgcccgcttcacatagccggcctgaatgtcccaggacggtttctcgtccatcgg

SEQ ID NO: 309 - DNA, 401 bp, Mycobacterium tuberculosis H37Rv
gcgttcgatgatccggtaggccgcgcccagtccggagatgccggcgccgacgatgacgacgtcgacacagccggcgtttggagtcacgctcatcgtgaacctcgcttgaaatcctggatcagcgaccagggtagccaggacatccagccagcccctccagatcgccgcgactagcggtagttcacaaactgcaatgccacatccaggtcggccttcttcagcatggcgatgacggcctgcaggtcgtcgcgcttcttgctggtgacccggacctcgtcgccctggatctgggttttgacgttcttggggcctgcgtcgcggatgagcttggtgatcttcttggcgttctcgctgctaatgccctgtttgagggcgccggtaactttgtacgtcttacccga

SEQ ID NO: 310 - DNA, 401 bp, Mycobacterium tuberculosis H37Rv
ttcgaggcgctctatgcagatcctcggcggctcgaggcgttcatggcggctatggacgcggcgtcgcgacgcaacatcgagctcctcgcgaaacgctttccgttcgagcgctaccggcgtctctgtgacgtgggctgcgcggacggtctgttgtcacgaatcgtcgcggcggctcacccgcacttgcagtgcgtcagcttcgacttgcccgcggtgaccgagatcgctcgacgcaagctgacagccgagggtttgggtgagcgggtgcaggcgtgcgccggtgactttttggccgaccctctgccggcggccgatgtcatcacgatgggccagattctgcacgactggaacctcgaccgtaaacagcagttggtcgctaaggcctacgaggccctgtccaa

SEQ ID NO: 311 - DNA, 401 bp, Mycobacterium tuberculosis H37Rv
tgatcgagacattgatcgacgacgcgcgacgcgaaaacacaaccggcctgatgatgtcactgaacatgcttatcgagttcggtgacgcgttcgactactccgccgccgacttccgggggtggtgtggcgaggcgggattccgttcgttcgaggtgatcccgcttgccggcggctccagcgcggcggtggcctataaatagtgggcaatgacatggtgggtggccgaccaacgtgaactgaggacggcaaatcggcctcagttcacgctcggcgctttgagcaacaaattgaacacatagaatcgtgtcgatgagcggcacatcgtcgatgggattgccgccgggacctcgactttccggctcggtgcaggccgtgttgatgttgcgccatgggctgcgttt

SEQ ID NO: 312 - DNA, 401 bp, Mycobacterium tuberculosis H37Rv
cggctcatgcgtcgcatacagcaggcggcgcacacggcatcgcggaggctggccgaagagcggggcgcattcccggcgttcaccgatagccggttcgcgcggtcgggcccgaggcgcaacgcacaggtcacctccgtcgctccgacgggcaccatctcactgatcgccggaaccaccgcgggcatcgagccgatgttcgctatcgcgttcacccgcgccatcgtcggccggcatctgctggaggtcaatccgtgcttcgaccgactggcccgcgatcggggcttttatcgtgacgagctgatcgccgagatcgctcagcgtggcggagtccgtggctatccgcggctgcctgctgaggtgcgggccgcgttcccgaccgcggcggagatcgcgccgcagtg

SEQ ID NO: 313 - DNA, 401 bp, Mycobacterium tuberculosis H37Rv
atcccatattggcgggccgcgagcagattcgacgtgcccgcagcgcccgcgagataactggtgcgcgcgaccttgcaggccgcgtcggtgccgtgagcgcgccgcgcgccgaaatccaccaccggtcgtccgcgcgcggcggcgaccacccgcgcggccttgctcgcgagcacgctttgcagatgaatctggttcagcacaaacgtctcgacaagctgggcctcgatgattggcgcgatcagctggaccgcgggttcgttcggaaaaatcacggttccttccggcgcggcccagacatctccggtgaaacgcactccggccagccacctcaggaactcgtcggaaaactggcccaggccacgcaggtaacgcagatcctgctcgtcgaatcgaaacgcttc

SEQ ID NO: 314 - DNA, 401 bp, Mycobacterium tuberculosis H37Rv
gccaacgcctcgccccagggccagcgccaatccacggggagcggaatgcgcccgttcacccgctcggccaggcgaacatagccggtcgcatcccgcatataccgttcgcgcaattgcggtttgccgggatgaggcaggatctgatcgacgccacggccgagcatgacgtcaccgcccagcagcaccgtcaccacatcaggattgccagccactccggaccaccgccgccttcaggtaatcgccgtaacacgcaccctatggcgtacattgcacgtcatacgatcggccggcggcggcctcgtgggtggggccgaaggtcctcaagaccgcgcccaaaggtcacattgccggcgacaaaccgtgcctacctggcggagaggtgcccgtcggcggtggtcacc

SEQ ID NO: 315 - DNA, 401 bp, Mycobacterium tuberculosis H37Rv
caagcgggtggtcttcacctggggttgggaggaccacggcgaccccccgccgggcgggtcgacggtgaccatcacgctgaccccggtcgacggcggcaccgaggtccggctggtccacgacgggctgaccgcgcagcaggccgcccggcacgccaaagggtggaaccacttcctggaccggctggtcgtcgccggccaacgcggtgacgccggtcccgacgaatgggccgcagcgcccgatccgctcgacgaattatcttgtgccgaagcaacattggccgttcttcagcacgtactgcgcgggataggcgcctctgacctgaccaggcagacaccgtgtacggaatatgacgtttcgcaactggcggatcatttgctgcgctcgctggcgatcatcggcg

SEQ ID NO: 316 - DNA, 401 bp, Mycobacterium tuberculosis H37Rv
ggccggttcgccgtgttgtccgatccgcagggcgcgatcttcagtgtgttgaagcccgcaccgcagcaatagggagcatcccgggcaggcccgccggccggcagattcggagaatgctagaagctgccgccggcgccgccgcccccgcctgcgcccccggccccgccgcggccgtcggcgccggggctgccgaactggccgggctggccggattggccgatgatggccaggggcccgaggtgtgcggtgccgccggtgccaccggtgccacccttaccgccagccccagggatcgggaataaaccgccggggtcggcccctttgccgccgtccccacctcgcccgcccgccccagcggtcctgaagccgtcgccaccgtgcccgccgtccccgccattccc

SEQ ID NO: 317 - DNA, 401 bp, Mycobacterium tuberculosis H37Rv
tccggcgcggccggccgcccctgtcgcaccggtcgcgcccagggtggaaccggtcccgccggcaccgccggcaccaccggtgccgccggtgccgccggtgccgccatttccgccagtcccgccagtgccagcgaggctgctgaagagagtgccgtgggcacctctgccgccgtcgccgccggtgccgccggtgccgccggcgccaccggccccaccatctccgccggcgccttggctgccgttgttgcccgttggcgacagcgctttgccgccggccccgccgttgccgccgccgccgccggcgccgccggtcccgccaaccccgccggtgccaccgttaccgccgtgaccgtccgcgccagcgtcgaatgtgccggtcgcaccggtggcgccggtggtgc

SEQ ID NO: 318 - DNA, 401 bp, Mycobacterium tuberculosis H37Rv
cgacacctcgtcggctgacgcgggcagcactttcgccaccgcggccgctgcggtgttggccgcagtgatcgtcgaaccaattttcgccaaatccgttgccgccgtggtcagcatctccggcgtcgcgattacgaacgacatctcgctccccaggtcaggtcagcccggtgttgcccggcgtggcaaggaattgtgtggctatcccggcgatctaccatgtggagcgaatcttcgggatcccaactccaacgatcccttgttgacgctatcgtcaaaagggcaaaaccccaaactttacgcgaacgaactatccacagtgcaccctcgatttccgtcgacacgtgcaaacggccagacctcgacggtgctagccccgcggcgatattgcaggtcttcgagcc

SEQ ID NO: 319 - DNA, 401 bp, Mycobacterium tuberculosis H37Rv
ttggcgacgtggttggcgcgctgtcggtcttgatgttgaaactgcagccagccagtgccaggctcagcgccaccgtcgcgacggccgccgtgaagtgcttcattgcgcgctcccgaagattggaccggcacttccggccggtgaggtcggattgagactagtccaactggtgtgcgcgcgaccctatcactgcaatcccatctcgattgaccgcaaaacaccgcgggaacaggcgtctatgcagtaagagacagctatgcgggcacgcaggttgcgcagagccctggccgcgctcttggcggtggcgggtctgtttgttccgttcattgttggcgtgcccacggcctacgacggtgagccggtgttcgtcgccattccggtcgagcatgtcaatacgctca

SEQ ID NO: 320 - DNA, 401 bp, Mycobacterium tuberculosis H37Rv
cattgttggcgtgcccacggcctacgacggtgagccggtgttcgtcgccattccggtcgagcatgtcaatacgctcatcggcaccggcacgggagccgcgatagtgggggagatcaacaactttcccggcgcctcggtgccgttcggcatggtgcagtactcgccggacaccgtcgacaactacgccggctacgactacgacaacccgcattccaccggattcagcatgacgcacgcgtcggtgggctgcccggcgttcggcgacatctcgatgttgcccacgaccaccccgctcggctcgcagccgtggagcgcctgggaggagatcgcccacgacgacaccgaggtcggcgtgcccggctactacaccgtacggttccccggtaccggggtgatcgccg

SEQ ID NO: 321 - DNA, 401 bp, Mycobacterium tuberculosis H37Rv
acttcaagcgctggtgtgccgacgaccaggaccaccaacgcgccgaccaaccaccccaccgccagccccaacaatgagcgggccggcacaatcgcgctgacaaccagatggatcggcacgaatgccaacagcagcgcccaccaccagtgccgccagcgcgcgggcagccagggacccgacacggtgagcaccgccgcgagcatcgcgatccatcgcgggtcatcgagaaactgggccagcaatgtggcgagccggtcggaaaggtcaaagtgccatcggggtgccgcgatgcggctactgctgatcgacaacgggagaacggccataagtccggcggccgcatacgcgcccagcagcttccactgccgggaaacgatcaggccaatcaggatcacgaacgg

SEQ ID NO: 322 - DNA, 401 bp, Mycobacterium tuberculosis H37Rv
cccgacgatctccgagatggatttctccagcgccacccactgcgggcgggtgatcagcgaactcgtgatcaccgccacgaggtagatcgccgccagcaccgcccggatgatgtcgttggtgcgccgggtcagtggttgcagcaagttaccggaaacgccgatgtcgcgtccgtcaactcgcatgttctaacgatcttccgaatcagggcccgcggtgtctggtgccgtttcgcggctccgcggacaacttagcccgataactgcgtggggtgtcggtctgaccacttgacgtcttaccaatcttcattcacactgggcgcatggcgctgcagccggtgactcgccgatcggtgcccgaagaggtcttcgagcagatcgctaccgatgtgctcaccggcgag

SEQ ID NO: 323 - DNA, 401 bp, Mycobacterium tuberculosis H37Rv
ggccaccctgttcggcaacaagtatgttgcgctgtccgcgccgaaaattcctcaacagcagcggatttcctcacatgacgtgattgatgtggggtcggtgaccaccgaattcaacacgttgttcgagacgatcacctcgatcgccgagaaggtggatccgatcgagctgaacgcgacgctgtccgcggtagcacaggcgctggatgggctgggcggcaagttcggtgagtcgatcgttaatggcaatcagattctggcgcaattaaatccgcggctgccgcagctcggctatgatgttcggcggttggcggatctcggtgaggtctatgtcgatgcttcgccggatctgtggtcctttctgcagaacgcactgaccactgcgcgcacattgaccagccaac

SEQ ID NO: 324 - DNA, 401 bp, Mycobacterium tuberculosis H37Rv
gtccggtacgcaccgtcaagttgttcggccagccgaccggcaggtgcacaccgcaatgagaacgctgaccgagttcaaccgcggccgtgtcgggatgatgggtgcggtggtcacggtgctcgtcgttggtgttgcgcaaagcttcaccagcgtgccgatgctgttcgccacacctacctactatgcgcaattcgccgacacgggtggcatcaacacgggcgataaggtggaaatcgctggggtgaacgtcgggctggtgcgctcgctggcaatccgcggcaaccgcgtgttgatcggattctcgttgcccggcaagacaatcgggatgcaaagccgggcagcaattcgcaccgacaccattcttggccgtaagaacctggagatcgaaccccgcggttcgg

SEQ ID NO: 325 - DNA, 401 bp, Mycobacterium tuberculosis H37Rv
cgacccggagaacttctggcgcagtgcgggtctgccggaattccgctggcccgaccccaacggcacccggttccccaacggcgcgccgccggcggcgccaccggtgcgggagggtacacccaagcatccgggaccggccgtcccgccgggaacgccgtgctcctacacaccggcggcgggcgcgttgccacggcccgacaccccactaccctgcgcgggcgccaccgttggcccgttcggtggacccgacttcccggcaccgctcgatgtccagccgtcgccgcctaatcccgatgggccgccgccgacgccgggcatcctaagtgctgggcggccgggcgagccggctccggctgttccgggcataccgatgccgctgccgccgaacgcgccgccgggtg

SEQ ID NO: 326 - DNA, 401 bp, Mycobacterium tuberculosis H37Rv
ccactaccctgcgcgggcgccaccgttggcccgttcggtggacccgacttcccggcaccgctcgatgtccagccgtcgccgcctaatcccgatgggccgccgccgacgccgggcatcctaagtgctgggcggccgggcgagccggctccggctgttccgggcataccgatgccgctgccgccgaacgcgccgccgggtgcacgcacccaaccgcttgagccgtttcctgacgggacgggaggtagcaaccaatgagcaccatcttcgacatccgcagcctgcgactgccgaaactgtctgcaaaggtagtggtcgtcggcgggttggtggtggtcttggcggtcgtggccgctgcggccggcgcgcggctctaccggaaactgactaccactaccgtggtc

SEQ ID NO: 327 - DNA, 401 bp, Mycobacterium tuberculosis H37Rv
ccgcgaagatcggccagaccagcctgttaggcacacaacatgtcgagctggccgcaccgccaatcccgtcaccgcagccgctgaaaagcggcgacaccatcggcctgaagaactcctcggcctaccctaccgtcgaacggaccttggccagcgtcgcgttgatcctcaccggcggcggcatcgtcaacctcgacgtgattcaaaccgagatcctcaacatccttgacggccatgccggtcagattcgcgaattcctcgagcggctagccactttcaccgccgagctgaacaaccaacgcggcgatctgactcgcgcaatcgactcaaccaaccaactcctgaccatcatcgccaaccgcaacgacacgctggatcgggtgctcactgacgtcccaccgctg

SEQ ID NO: 328 - DNA, 401 bp, Mycobacterium tuberculosis H37Rv
ccacacccgctgccgtcgcagccgcgcgcatacctcgaacccgtcgataccgggcagcatcacatccagcaccaccgcgtcgtagtcaccgccgtcgacggccgccaccgcatggcggccgtcggcaacggtgtcgaccgtgtggccctcctcggtcagcgcccgcgccagcagcgccgtcatcttgggctcgtcctcgaccaccaggatgcgcacacccgacaccctgccgcatgcccggcccgggccgcgaccagctctcatcgtcgtttcatctgccacccctaccgtcggagccgcacaccgtcacagcgaggtagacagatcaggagaaagcgatgaatcgcatcgtgcagttcggagtttccgccgtggccgcggcggcgatcggcatcggagcc

SEQ ID NO: 329 - DNA, 401 bp, Mycobacterium tuberculosis H37Rv
ccgccgtggccgcggcggcgatcggcatcggagccgggtcggggatcgcggcggcgttcgacggcgaggacgaggtgaccggccccgacgccgaccgcgcgcgcgccgccgcggtgcaggcggtcccgggcggcaccgccggagaagtcgagaccgagaccggcgaaggcgccgccgcctacggcgtgctggtcacccggcccgacggcacccgtgtcgaggtccacctggaccgggatttccgggttctggacaccgaaccggccgacggggacggcggttagcatcggcgcatgcccgcaccgggccaccgatagcctccgggtgcgcaccgatgagatctagcgaggagaccatgatcaggcgacgaggcgcccgtatggccgcgctgctggcggcgg

SEQ ID NO: 330 - DNA, 401 bp, Mycobacterium tuberculosis H37Rv
tcgacggcgaggacgaggtgaccggccccgacgccgaccgcgcgcgcgccgccgcggtgcaggcggtcccgggcggcaccgccggagaagtcgagaccgagaccggcgaaggcgccgccgcctacggcgtgctggtcacccggcccgacggcacccgtgtcgaggtccacctggaccgggatttccgggttctggacaccgaaccggccgacggggacggcggttagcatcggcgcatgcccgcaccgggccaccgatagcctccgggtgcgcaccgatgagatctagcgaggagaccatgatcaggcgacgaggcgcccgtatggccgcgctgctggcggcggccgcgctggcactgaccgcatgcgcgggcagcgacgacaagggcgaacccgacgacg

SEQ ID NO: 331 - DNA, 401 bp, Mycobacterium tuberculosis H37Rv
tggtggtcaccgaagacgagctggcctcggtgaccgacgccgtgcaggccggcggcctgcagcagaccgcgctgcacaagcacctgctcgagcagtcgccgccgatctggtggacccacatcgccggccacggcgacgccgccgacctggcccgtgcggtccggtcggcgctggatgccaccgacacaccaccgcccgcctcggcaacttccggccagaccagcttggacctggacaccgcggccatcgatgaggcgctgggccgctccggcaccatcgcgggcggggtgtacaaattcttcatcgcccgccgcgatccggtcaccatgtccggcatgctcatccccccgtccatgggtctggctaccgccctcaacttccagcccaccggcaacggccgc

SEQ ID NO: 332 - DNA, 401 bp, Mycobacterium tuberculosis H37Rv
gtcgctcggttcgccggaatgtcgccgccgcgtccggcgcggtcatgatcgtgatgacgtccaacccgtcggcgcggtgaacggcgggccggccggtgcccggggagacggcaacccaccacggcccttcgtacagcaaatcccgctggccggggcccggtttggcaacggcatcctcgagctcgaccgtgcgcgcccagttctgcagctcgggcagcgcacccggccggaacgccgaaccccacggttcgtcgggatcgaatgacaggccaccgacgagcggagcgatgtcgcgaaccagttccaggccggaatattcgcggccgtccgacgccgaactctcggcgatgagcatcggtgtgccgtcatcgagcgccacggtctcgagttcgccgtctatc

SEQ ID NO: 333 - DNA, 401 bp, Mycobacterium tuberculosis H37Rv
cgacctcatgcgacgaggcctggccgccaaccgccctaccgcgttgtcctcagaccccagaacgggattgcctttggtgagcgtcgggaccgtcgtgacctccgaggacgtgcgttcattagaggacgagcagtgacggtgctgctcgacgccaacgtgctgatcgcattggtggtcgccgagcatgtgcatcatgatgccgcagcggactggctcatggcgtccgacaccggatttgcgacctgcccgatgacacaaggaagcctggttcgattcctggtgcgctcgggacagtccgcggcggcggctcgggatgtcgtcagtgcggtccagtgcacgagccgccacgaattctggcccgatgcactctctttcgccggtgtcgaggtcgctggtgtggt

SEQ ID NO: 334 - DNA, 401 bp, Mycobacterium tuberculosis H37Rv
gtagcgaggtgcccgcccccgactacgacgttgtcgtcttcgagaaccggtttcccagcctggccggggccggcatcgccccaatcggcgcgcccgacggtgacgggttcgtatccgctccggggcacggacgctgcgaggtgatctgcttttcggccgatcacaccggttcgttcgcgggcctggacccggcgcatgcccggctggtcgtgcacgcgtggcggcaccgcaccgccgaattgacggcgctgcccggggtagcgcaggtgttctgcttcgagaaccgtggtgaggagatcggggtgaccctgcccacccgcacggccagatttacgcctatccgtatctgacgccgcgcaccgcggcgatgctgcgccaggctcgtcggcaccgaaagcgtc

SEQ ID NO: 335 - DNA, 401 bp, Mycobacterium tuberculosis H37Rv
cggtttcccagcctggccggggccggcatcgccccaatcggcgcgcccgacggtgacgggttcgtatccgctccggggcacggacgctgcgaggtgatctgcttttcggccgatcacaccggttcgttcgcgggcctggacccggcgcatgcccggctggtcgtgcacgcgtggcggcaccgcaccgccgaattgacggcgctgcccggggtagcgcaggtgttctgcttcgagaaccgtggtgaggagatcggggtgaccctgcccacccgcacggccagatttacgcctatccgtatctgacgccgcgcaccgcggcgatgctgcgccaggctcgtcggcaccgaaagcgtcacggtgacaacctgtttgccagcctgctggcacgcgaggtcgccgac

SEQ ID NO: 336 - DNA, 401 bp, Mycobacterium tuberculosis H37Rv
agcgggcccggctcgcacagcgagccgagaacgactacgtcggtgccccaacgggtttgctcgaccacctggccgcgctgttcggagcgccgaagaccgcgctgctgatcgactttcgcgacatcaccgtgcgcccggtggccttcgacccggacgcctgcgatgtggtgctgctgttgatggattctcgagcccgacactgtcacgccggcggggagtatgcgctgcgccgggcgtcgtgtgaacgggcggccgccgatctgggggtgtcctcgttgcgcgctgtgcaggatcgcgggctggcggcgctgggcgcgatcgccgatccgatcgacgcgcgccgcgcccggcacgtgctgaccgagaatcagcgggtgctggatttcgcggccgcactggct

SEQ ID NO: 337 - DNA, 401 bp, Mycobacterium tuberculosis H37Rv
tgatcgccgagagcgccgtacgggccggtgcgctgggcgcccggatgaccgggggcggcttcgggggcgccgtgatcgcactggtgcctgccgatagggcgcgcgacgtggccgacacggtgcgacgggcggcggtcaccgccggctacgacgagccggcggtgagccggacctatgccgcgcccggcgcggccgagtgccgttgagcgggttggcgaagcgtcatgtccacagtgagcagatcggtgcgggtccgccactgcccttgacctcgaagccgaacaccggctacgagaccgctgccgcggtggatctggtgtctggggcttagcccgcttcgctgatacccagaaccagtgcgagcgcgtggtcggtctggcgcatcctgccaggtgccaggg

SEQ ID NO: 338 - DNA, 401 bp, Mycobacterium tuberculosis H37Rv
agttcgaagcgcgtcggcctggtcgccgcggggaaaacgtggacgagcgccgatattcttcgcgatcacctggccctgcggcagcggttcgggggcgcccgcctggtgtggtcggggcactggaccaccttcagcggacccgatttctgggtgacggtggttgggccggcgcagcccaccgcagctgaggccaatcgctgatgcgactcgaacgggttcggcgccgatgactgtttcgcgaagttcatcagcaccctcgttggcgcgaagggcacgacggtgtaccggaagtgacgacgctgccatgagtttctgcgtgtattgcggtgccgagcttgccgacccgaccaggtgcggggcgtgcggcgcatacaagattggttcaacctggcatcggacca

SEQ ID NO: 339 - DNA, 401 bp, Mycobacterium tuberculosis H37Rv
gccatctgccacaacggaactccgaacgtcccgaacgcataggaggcgaacgcatccgatatgccggggacaaagcgttggccgacgacggcccacaggccgcatcgttcgatcagcgcgtcggtgcgatcggcacgttccccgcccagcagggctcgcgcgctggcccggccggctcgacggccgaccaggctcgcgacaacggcggtgcccaccgtggcacccagcgtcacgaagacccccactagcggaccgaacagcagcccgctgcttgcggccaggatcgggcccgggacgaacaacgcgccgagcacggccgacactacgacataggtcagcggcgccgccggcccggtcgccgagaccgcgccccgcaccgcggccacatcgatgacgtccgt

SEQ ID NO: 340 - DNA, 401 bp, Mycobacterium tuberculosis H37Rv
acgacggtcgttcccggcaggtcggtgttgaggtgctcgatgagcagattcgacgggaacgagtacgggtccggcagcagcaggtgcaagtcgtgcgcggtccggtcgaagcggtaaccggtgatcagagcgcccgagccggtgcgaacgaagtccaggtggaatgtctccgcgggtgggccggacgccagccacaccgccaccgcgggctcgttctccagctcgtggcgaccggcgacgatgccttgggccacgcaaccgatcagcgcggccggctcgaccgacgcctgcaccgcagccagcaggtccacggcctggtcggtgtgtgaccgcgatccgaggagcacggccagcgccggcgtcccacccgcgagctcctcgcgcgcgtgcgcggcagcctc

SEQ ID NO: 341 - DNA, 401 bp, Mycobacterium tuberculosis H37Rv
ccgtcgccgtgctgttcgtgtatgcgatgtcaaagtccgggcgcggttacccgacgagccgagcacatccccgacgagtcagccacaccccgtcgactgtaaccgcatccgcaacccgctggcccgcaccgcccggcgtgcgatcgcggcccgcaccgaagcttcggacccgaccacccggaccttgcgtttggcccgggtcaccgcggtgtacagcaactcccgggtcagcaaccgcgaatcctcttgcggcatcagcaccgtcacctcgtcgacctggctgccctgactcttgtggatggtcatcgcgtgcatggtctcgacgtcgccgaggcggccggtggcaacgtcaagtggcccggatgcaccagaaatgacggcccgcagaccggtggggccgg

SEQ ID NO: 342 - DNA, 401 bp, Mycobacterium tuberculosis H37Rv
tgcagcgtgaccgcgtgcaggtcgccgagccgtgcccggtcggtggcgtcgagcttggccatctcgcgccgtaccgcctcggccagccgggccgccgccttgccggtgggtgcggccagcgcgatccgcggccgcggctcaccggccagctccgcctgctcggcaaccaacgccagcagccgcgcgaccgtcgtcgtcttcccggtgccaggcccgccagtcaacaccgtaacaccttgcgagagcgcgatttccgccgcgcgccgctgctcgtcaaagccggtcgggaacagtcgccgcaagtcgggtaccccggccggtcgcctggatgtcagcaacgcgagcaggtccgcgcacacctgctcttcttcgcgccagtagcggtccagatagagcagccg

SEQ ID NO: 343 - DNA, 401 bp, Mycobacterium tuberculosis H37Rv
gagcttcacgactgcagccttccccggtcgagcagatccgagagcgccaccaccaacgccgtgggcgggttccaggtgaacacaccggccggatgcccggccgtcaccggcgtcgccgcaccgcacatgccccgcacaaacaggtacagcaccccgccgagatggcgcgccggagcgtaatcccgctgccgccaccgcagaaagcggtgcagcacaacaacatacagcagcgcctgcagtgggtagtccgaatgcagcatggcctcggtcaaccgctcgaagccgtaatcggcggcggtgtcaccaaggtgattggtcttgtaatcgaccaccagatatcgctgcccgggtagccgcagcaccacgtcgatcgaccccgccaggtagccacgcagcggttg

SEQ ID NO: 344 - DNA, 401 bp, Mycobacterium tuberculosis H37Rv
gggagccagctgcgcgtggtcgacgtccacggtccaccacggcgcgtgccggcgcacctgggcttccagttcggcagccagatcgggagcggctgggtccgcggtctcgagcaccgcgtgcaccagcgagccgaacgacgcccccgacggcagcgcggccagcggtgatgtcagatcggcgccggaaccgggcgcggcgacgacggcgatctccacctcgtccgcacggccgccggccgccggctcgctggtgacggtgacggcttccgagccccgcaccagatccgagtacgaggtccgccgccacgtggtgtcgatccggcggtgaaagtgccgaacctcgaaaccgggtacgggcaccggcttttcgagggaactgcgagcaccgatgaccgattcct

SEQ ID NO: 345 - DNA, 401 bp, Mycobacterium tuberculosis H37Rv
ggcggcgttgtcaccggccacaccgagggatttcaacaccgagccgcagaactcgtgggtggtggcgatggttgccgcgtcgaagttggccagcgcgtcacgcagccgcgaccgcttctgggcgcgctcggcgtcgctgccgcgcagcaggtgctcgacgagctcgccgctcggcggcgcgtcgccttgtagcgcgcccacggcctcgacgatctgcccgcgcactcgctcgcgtaactcccggctggccgcacggttgaacgtgatcaacaacatctcgtcgagcgtcgcggcggtttcggccagatagcgggtgaccagaccggccagcgcgaacgtcttaccggtgccggcgctggcttccagcacggtggtggtgccctccctcggcaacgggccca

SEQ ID NO: 346 - DNA, 401 bp, Mycobacterium tuberculosis H37Rv
cgggtgtcaccgtgccgctcagtcgccgcccgtcgccgaggtcgacgtcgacgtcgtgcgcctggccgtggccgtcgcggtgcgccagcgcggcggccgccagatcgcgcgcgcggttccggatttccttcgcccgtcgcacgccgaggcgcccgggcggcaacgtgccgcgacgccattcggagtgagcggcgtcgtcggggtgcaggccgcggagcatgtcgcgcaacatccgctcgcccaccgtccactcggccaaggcgtcgacctggaccggtatcgagtcctcgacggtgtcgacgtcccagggcagcgtgtagtccagcgcccggaagaaccccttgaccggatccttgaagaagtcgagcaggtccgccagcgtcacgtcggccgcgggtggt

SEQ ID NO: 347 - DNA, 401 bp, Mycobacterium tuberculosis H37Rv
cctcaccgaggccgaagccggcgacgatcaacggtgcgtaggtgtcgatgtcggggcacatcaccacgatgtcgcgcggttgcagcgtcgggtcgtcctcgaggaggccgagcagcacctcgcgcagcacatcgatttgccgcgccgggccgtgacaggcatggacctgcaccgatcggtcggcatccgacaagctacgcccggcgggtcgcggcgcgttgccggcgatgtcggcttgcagccatcccagcaacgtgtcgggtttggttgtggcaccaaggaattcgtcggtggcccgggcggcgggcagcgcgcgctgcagttcgcgcacgtcgcggcccagcgtttccagcagcgggtgctgggcggcccgccggctggtgtcctgccgccgcggcagc

SEQ ID NO: 348 - DNA, 401 bp, Mycobacterium tuberculosis H37Rv
tgggccgccacccgatgatcgccgcaggacaacagaaacgcgcccatggcgatggcgtgaccggtgcacgccatcaccaccggtttggggtaggacaagaggcgatacgccagctcgaagccgcccctgagcatgtcgatcgcgggctgcacttcaccggaggtgaggatcttcaggtcgaagcctccgctgaatacccggccattaccggtgatcaccagcgccccaacatcatcacggtccgcgttgtcgatcgctgcattgagggcttgttgcatcgccgggcccagtgcgttgaccttgccgtcgtccatactgatgacggcgatggaatccttgcgggtatagctgaccgggtcgctcatgctctcgattgaatcagatcagcattgggggatctt

SEQ ID NO: 349 - DNA, 401 bp, Mycobacterium tuberculosis H37Rv
cctggcgggccgtgccggcgaggatggagagggattttctgatggcgctgcgtgagttcagctcggtgaaggtcggagaccagcttccggagaagacctacccgctgacccgccaggatctggtgaactacgccggagtttcgggtgacttgaacccgattcactgggacgacgagatcgccaaggtcgtcgggctggacaccgcgatcgctcacggcatgttgacgatggggatcggcggtggctacgtcacatcctgggttggcgacccgggcgcggtcaccgagtacaacgtgcggttcactgcggtggttccggtgcccaatgacggcaagggcgccgagctggtgttcaacggtcgggtgaaatcggttgatcctgagagcaagtcggtgaccatc

SEQ ID NO: 350 - DNA, 401 bp, Mycobacterium tuberculosis H37Rv
tcgacccgcgtaaggcagaccagatggttcgcggcacggtcaacctgccacacggcactggtaagactgcccgcgtcgcggtattcgcggttggtgaaaaggccgatgctgccgttgccgcgggggcggatgttgtcgggagtgacgatctgatcgagaggattcagggcggctggctggaattcgatgccgcgatcgcgacaccggatcagatggccaaagtcggtcgcatcgctcgggtgctgggtccgcgcggcctgatgcccaacccgaaaaccggcaccgtcaccgccgacgtcgccaaggccgtcgcggacatcaagggcggcaagatcaacttccgggttgacaagcaggccaacctgcacttcgtcatcgggaaagcgtcgttcgacgagaag

SEQ ID NO: 351 - DNA, 401 bp, Mycobacterium tuberculosis H37Rv
caagccgtcctcgtcgaagggccgctacctgaagaagatcaccgtgtcgacgacgacgggcccgggcattccggtcgacccatccatcacccgcaacttcgcgggggagtagtttccccggcgagcagacgcataagcccccgcacgcacggcgtgtcgggggcttatgcgtctgctcgccgggcttaggccgcggcacccggcttgaggtaggtcaccaggctgcagtcgagcatctcgtcggtgaagtagtgctcgcagccacgcaaatacttcatgtagcggttgtagacctcttcggaggtgacctcgatggccttgtccttattggactgcagcgtgtccccccagatccgcagcgtcttgatgtaatgcgggcgcaacgagagcggctccgggac

SEQ ID NO: 352 - DNA, 401 bp, Mycobacterium tuberculosis H37Rv
cgcttgaagaagtcgtcgtagttctcgtgcccgaagtgctcgaaggcttcgatcgacacaatccggtcgacgggttcggcgaaatcctcccagccttgcagcagcacttgacgtgagcggttggtgtcgatcgaagccagcacttgctcgcagcgggcgtgctggttcttggacaacgtcaggccgatgacgttaacgtcgaaccgctcgacggcgcgcctcatggtggtgccccaaccgcacccaatgtccagcagcgtcatgcccggcttgaggtccagcttgtccaggttgaggtcgaccttggcgtattgggcttcttcgagcgtgagctccggtggctcgaagtaggcacagctgtaagttcgggtcgggtcctggaacagggcgaagaaatcatc

SEQ ID NO: 353 - DNA, 401 bp, Mycobacterium tuberculosis H37Rv
cgtggtcgaccatctgctgcctggtcaggccggtgatcgtgtgcagcagcaacacgccatcgggcggcaggattttgtgggcccgggcgaagaagtcggcgtgacgatcgtggccgaagtgctcgaacgcgccgatcgacacgatgcggtcgacgggctcgttgaactgctcccatcccgccagcaacactcgcctgtcgcgcggggtgtccatctcgtcgaacgacttctgcacatgggcggcctggttcttcgacaatgtcaggccgacgacgttgacgtcatactgcgcgatcgcgcgccgcatggtggcgccccagccgcaaccgatatcgagcagcgtcatgccgggctgcagacctagcttgcccagcgccaggtcgatcttggcgatctgggcc

SEQ ID NO: 354 - DNA, 401 bp, Mycobacterium tuberculosis H37Rv
tagccagcgggtgcgtggatcgatgcggcccatgatcccgaagtcgaagaacacgatgcggcccgcctcgtcgacgtagaggttgcccgcgtgcaggtcgccgtggaacagcccgtgccgcaggccgccctcgaacaccgaaaacagcagtgccttgaccagctcgacaccgtcgaacccggccttgcggatcgcggcggcgttgtcgatgcggatgccgtgcacccgttccatcgtcaacacccgctcggtggtgaagtcccagtgcacctgcggcacccggatgtttttgcccagcggcgaggcgtgtaggtgggagacccaggcctccatggactgcgcctcgaggcgaaagtccagctcctcggccaggttgtcggcgaagtcggcgaccacgtctt

SEQ ID NO: 355 - DNA, 401 bp, Mycobacterium tuberculosis H37Rv
cgaccagctcaaaaaggtcgcgctgacccgcaacgtgctcctgccggtgggcaccgactacaccccgccgaacaagtgggtcaccgccatccaccgcgactggggtgcgcgctacacctggccgcgcttcgtgtgcgcgctgcccaaggagttcttcgccgcggtgcgcgccgaactggccaagcgtggttgggtgccgtcgccgcagacccgcgacatgaacccgatctacaccggcaaggacgtctcctacatcgacaccaaacaagccaaccgggccgccgagaacgccgtcctggaagccgagcggttcgcggtgttcgccgcgctgctgaccggcgccgagtatccgcaggcggcgttggccaaggcgtgggtgcaactggcctacggtgcgcacc

SEQ ID NO: 356 - DNA, 401 bp, Mycobacterium tuberculosis H37Rv
accctgcacaccgcgctgatgcggtcgtgcaccggctggccctccggggtctggatcgaccagccgcgacgcaccgccccggatggctcgaatttccaactccagcactggacccaccacttcgactacgcgcttgtctgcggcggcggcgattggcggcgcgccggcatcccggcgcgcagcgcgcagttctcccacccgctgcttgcggtggcgccgcgacggccacagggcgagctgccggcggtcggctcgctgctgcacgtcgagccggccgactcggtgcagctgggcgcgctcaaggcggccggcaacccgctggcagccggcagcgcgcggccggtccaacccgccgcggtggcgctgcgattggtgcaaacgacaggagccgacaccccggt

SEQ ID NO: 357 - DNA, 401 bp, Mycobacterium tuberculosis H37Rv
ccacttcgactacgcgcttgtctgcggcggcggcgattggcggcgcgccggcatcccggcgcgcagcgcgcagttctcccacccgctgcttgcggtggcgccgcgacggccacagggcgagctgccggcggtcggctcgctgctgcacgtcgagccggccgactcggtgcagctgggcgcgctcaaggcggccggcaacccgctggcagccggcagcgcgcggccggtccaacccgccgcggtggcgctgcgattggtgcaaacgacaggagccgacaccccggtcaccatcggctgcgagctgggcaaggtaggcgccctccggccggccgacctgctggaaacgccgctcgcaatggcaagggcgcgcaagtcgtccatcgacctgcacggctatcagg

SEQ ID NO: 358 - DNA, 401 bp, Mycobacterium tuberculosis H37Rv
ggcggactgccagctgaccgcgcggcacgccgaaatcccggcgtgggacgacatgccggaggacctcaaacccgtgctatgccggcagatggaggtctacgcgggctttctggaatacaccgaccaccacgtcggccggctcgtcgacggcctgcagcgcctcggtgtgctcgacgacacgctggtgttctacatcatcgacgacaacggcgcctcggccgagggcacgatcaacggcacctacaacgagatgttgaacttcaacggcctggccgacatcgagacgccgcggttcatgaccgaccggctcgacaagttcggcgggccggagtcctacaaccactattcggtgggttgggcgcatgcgatggataccccctatcagtggaccaaacaagtgg

SEQ ID NO: 359 - DNA, 401 bp, Mycobacterium tuberculosis H37Rv
agcggcgagccgttcccgtacccggtcacggttggctacatgtacatcatgaagctgcaccacctggtggacgacaagatccacgcccgctccaccgggccgtactcgatgatcacccagcagccgctgggcggtaaggcgcagttcggtggccagcggttcggggagatggagtgctgggccatgcaggcctacggtgctgcctacaccctgcaggagctgttgaccatcaagtccgatgacaccgtcggccgcgtcaaggtgtacgaggcgatcgtcaagggtgagaacatcccggagccgggcatccccgagtcgttcaaggtgctgctcaaagaactgcagtcgctgtgcctcaacgtcgaggtgctatcgagtgacggtgcggcgatcgaactgcg

SEQ ID NO: 360 - DNA, 401 bp, Mycobacterium tuberculosis H37Rv
gttgcgattcgtcatgctcgtaccgtgggtagcgaagaaatggatcacgcccacggtggcctcgccccggtcgatacgcacgagcgtggtatgcgggtcgacgcgtttcgggaagaacgccttgtcggccggcgggttgcggtcgaacgctgatggggatcgattgatgcttgcgccgtacagctcgccgtgcgagagcgaaacctcggcgggcgccacatcggcatgcgcatgttccaccgattcgacaattccgtcgacgatcgccgcaaaggttgccggccgaaagccgctcgtggtcaggttgtacagcaggtatccgcagtacccgccaggcccggcgtgggtgtgggtcgccgtgatcagtgtgttctgctccgagtaggtatcgccatacaaat

SEQ ID NO: 361 - DNA, 401 bp, Mycobacterium tuberculosis H37Rv
cgtgacctaagtcgctggtgaatgccggcggtgcgctggtcggacttgccgtagccgagcatgccgcagtccgccgcctcaccagtgatgtcggcgatgccgcgccctacactaagcattgcctaatcctccgcaccagcagcaaatttcacgagcgctgactacgcgctgctccggggaaacgtatcccacaaggagaaacactttatgcgccggggcccacgaatacggacggcagcatcccgtgccgcggctggccggacgtgatccgagggtgtgggtctcaccagatcggtctcactagacttgggttgtgctcattggttcgcatgtcagcccaaccgatccgctggccgcagcggaggccgaaggcgctgacgtagtgcagattttccttggca

SEQ ID NO: 362 - DNA, 401 bp, Mycobacterium tuberculosis H37Rv
ggcggcgatcacgcgatggcgcgccgcttcgacaccatcgcccggctctgggacgtcatcggcgacaccggaatcgggttttgcctggacacctgccacacctgggcggccggcgaggcgctgaccgatgccgtcgatcggatcaaagcaattaccggccgcatcgatctggtgcactgcaacgactccagggacgaagcgggatcgggccgtgaccgccacgccaacctcggcagcggccagattgatcctgacctgctggtggctgccgtcaaggcggccggcgcgccggtgatctgcgaaaccgccgaccaaggtcgcaaggacgacatcgcgtttctgcgggaaagaaccggcagctgacttcaagccccgcggcacctaccgttgacttatgctcc

SEQ ID NO: 363 - DNA, 401 bp, Mycobacterium tuberculosis H37Rv
gattccgggatgccccggctctaccgggaggcgccgttgatgggcatctgggagggctcgggcaatgtcagcgcgctagataccttgcgcgccatggcaacccggcccgcatgcgtcgaggtgctgtttgacgagctggcccgcagcgcaggccaggaccccaggctggacggccacgtcgaaaggctgcgtccgcagctgggcgatcttgacacgatcggttatcgagcccgcaagattgccgaagacatctgcctggcgttgcagggatcgttgttggtgcgccacggacatcccgccgtcgccgaggcgtttctggccactcggctcggcggccagtggggcggagcgtacggcaccatgccggccggtctggatctcgcgcccatcctcgagcgtgc

SEQ ID NO: 364 - DNA, 401 bp, Mycobacterium tuberculosis H37Rv
cctccttgagccgggcaaccagcagcaggttgtagtccgcgccgacggccagcaggatgatgaccgccatcgccaacaccaaccagtgcagctcgatacccaggatgtgttgccagatcagcaccgacagcccgaacgaggcgcccagcgacaacaccacggtgccgacgatgacggcggccgcgacgacgctgcgggtggtgatcagcatgatgatgaagatcaggcagagtgcggagattccggcgatcatcaagtcataggtgttgccgtcggacaagtccttgaacatcgccgcggtaccgcccaggtagatcgcggatccctccaacggtgtgcccttgatggcttccttggcggcggtcttgatcttggcgatgcgcgcgatgcccgcctggctc

SEQ ID NO: 365 - DNA, 401 bp, Mycobacterium tuberculosis H37Rv
gcggtcgcggttttcgacggcaaagagggtgtcgaaccgcagtccgaacaggtgtggcggcaggccgacaaatacgatgtcccccgaatctgcttcgtcaacaagatggacaagatcggtgcggacttctacttctcggttcgcacgatgggggagcggcttggggccaacgccgtgcccattcagcttcccgtcggtgcggaggccgacttcgaaggcgtcgtcgacctggtggagatgaacgccaaggtgtggcgcggcgagacgaaactcggcgaaacctacgacaccgtggaaataccggccgacctggccgagcaggctgaggagtaccggaccaagctgctcgaggtggtcgccgagtccgacgagcacctgttggagaagtacctgggcggtga

SEQ ID NO: 366 - DNA, 401 bp, Mycobacterium tuberculosis H37Rv
cggtggtctggtcgggccgatcttcttggtcgtctacttcacgctcggactgggcagcctgatgtcgtggatgttctatgtcggtctgatcattaccgttgctgacgtgctggtcgcgctcgcattgaccaactacggggcaaagaccgctgccaagaccgcggcacttgaacggagtggagtgctggcgctcgcccaaatcaccgggctcagcgagacagggacccggatcaacgatcaaccgctggtaaaggtgcacctgcacatctcgggacccggcatcactccgttcgacacggaagaccgggtcatcgccagtgtgacccggctgggcaatctcacggctcgaaaactggtggtattggtgaatcccgccacgcagcaatacctgatcgactggg

SEQ ID NO: 367 - DNA, 401 bp, Mycobacterium tuberculosis H37Rv
ttagggtttctggcttgtcaaaggacaggaccagcgcagatcactgtagtcttagctgatgctgccgcccggattgccgacgtcgtggcccagcggtgccccaacgcggtccgccgcgtcgatcctttccacgtggtggcctgggccaccgaggctctagaggctgaacggcgccgggcctgaaacgacgcgcgagcgcccgcccggaccccgagtcattgggtcgcaggggtaaccgaagggtgcacgttgaccgcgtgaggctaaccggcaccgagcgtgaactgagggcggagaatcagagccccccgattttccgcccgcagaacacgttgggcgacggcgccaacgggctgccactggccgtgtgcaccacgacggctcacacgtgccacacttcc

SEQ ID NO: 368 - DNA, 401 bp, Mycobacterium tuberculosis H37Rv
ggaggtggcgctaagcttgcgcgctcggccgggtcgagcatccagctgctcggcaaggaggccagctacgcgtcgctgcgtatgcccagcggtgagatccgccgggtcgacgtccgctgccgcgcgaccgtcggcgaagtgggcaatgccgagcaggcaaacatcaactggggcaaggccggtcggatgcggtggaagggcaagcgcccgtcggtccggggcgtggtgatgaacccggtcgaccacccgcacggcggtggtgagggtaagacctccggcggccgtcacccggttagcccgtggggcaagcctgaggggcgtacccgcaatgcgaacaagtcgagcaacaagttcatcgtccgacgccggcgcaccggcaagaagcactcgcgttagccgcg

SEQ ID NO: 369 - DNA, 401 bp, Mycobacterium tuberculosis H37Rv
ggaaatcctcagctgattcctaccctgtgcgtgtagtgtacacaaccgttcattaactccacggggaagtgaggctggcttatggcacccgaggccaccgaggcgttcaacggcaccatcgagctggatattcgtgattcggagccggattggggcccatacgcagcgccggtggcaccggagcactcaccaaacatcctgtatctggtctgggacgacgtcggcatcgcgacctgggactgctttggcggcctggtcgagatgcccgcgatgacgcgcgtcgccgagcgtggcgtgcgactgtcgcaatttcacaccaccgcactgtgctcgccgacccgggcgtcgctgctgaccggtcgcaacgccaccaccgtaggcatggctaccatcgaagagtt

SEQ ID NO: 370 - DNA, 401 bp, Mycobacterium tuberculosis H37Rv
tgtgctcgccgacccgggcgtcgctgctgaccggtcgcaacgccaccaccgtaggcatggctaccatcgaagagttcaccgacgggttccccaactgcaacgggcggatcccggctgacaccgcgttgctcccagaggtgctggccgaacatggctacaacacctactgtgtgggcaagtggcacctgacgccactcgaagaatccaatatggcgtcgacgaagcggcactggccgacctcgcgtgggttcgagcggttctacggattcctaggcggggagaccgaccagtggtatcccgacctggtatacgacaaccacccagtgagtcctcccggcacacccgagggtggctaccacctgtcaaaagacatcgccgacaagacgatcgagttcattcgt

SEQ ID NO: 371 - DNA, 401 bp, Mycobacterium tuberculosis H37Rv
ctacgcatgaattcgactaccggagcgggcctggctgggcgtgggcgcgcgcagttgtacggccccaacggcgtgtcgctgtacaaacacacgccctcgctggtccggttgccccaaaaagccaagccccccaaaccagttgctcgccagcaatgacgccggttgctaccatctgactccgtgtcgcttcccggggcaggactggggcagtgggttatccggtgatgaccgatggccggtagcgacccaccaacaggtgggccggcgtcgcaggcgggttcagacgcgggagcctcgccagaacacaaacacatgtcgcggcgaaagcacctcgtgctcgatgtctgcatcatcctgggtgttctcattgcctacgtcttttcgctgctcggctacgactg

SEQ ID NO: 372 - DNA, 401 bp, Mycobacterium tuberculosis H37Rv
accggccgcagaaaattccaaccaccgttcggcacttggtacgccgcgatgttgttcgctgtcgtgccgctgcgcactattctcccgggctcgccgccggcgggtgcgtggattgaccgggccgttgtgatctgggtgctcatagcgctggcggcggcgatggtggtgtacatcgtcgcctggtaccgagaatcggactaaggcgggcgtcagatggcttctgtcgacgcgtccggagggtttccgctggatttcataaacaggcgctagcgcggtgtccaacgatacgattggggcccatgcggcccgacgagatcggctcgctgcgggccggcctggcggctgttgcgcggtgaactcaaaacgcgttgacgccggatcagctatccgatgattcaggc

SEQ ID NO: 373 - DNA, 401 bp, Mycobacterium tuberculosis H37Rv
agaggacgtcgccccggccgggatgctgaaggcgcgtcggaaaagtgaagcgctggccgccagcgttttgccggatagaacgatatagccatgtcacagctgaagatcacccaggtgcgcagcaccatcggagcacgctggaagcagcgcgagagcctgcgcactctgggcttacgaaggattcgtcattcggtgatccgcgaagacaacgcagcgactcgcggactgatcgcggtggtgcgtcacctcgtggaggttgagcccgcgcagaccggagggaagacatagtgacgctcaagctgcatgacctgcgccccgcgcgggggtccaagatcgcccgcacccgagtcggtcgaggtgacggctccaagggcaagacggccggccgtggcaccaagggc

SEQ ID NO: 374 - DNA, 401 bp, Mycobacterium tuberculosis H37Rv
cacgctggaagcagcgcgagagcctgcgcactctgggcttacgaaggattcgtcattcggtgatccgcgaagacaacgcagcgactcgcggactgatcgcggtggtgcgtcacctcgtggaggttgagcccgcgcagaccggagggaagacatagtgacgctcaagctgcatgacctgcgccccgcgcgggggtccaagatcgcccgcacccgagtcggtcgaggtgacggctccaagggcaagacggccggccgtggcaccaagggcaccagggcccgcaagcaggtgccggtgaccttcgagggcgggcagatgccgatccacatgcggctgcccaagctcaagggcttccgtaaccggtttcgcaccgaatacgaaattgtcaacgtcggcgacatca

SEQ ID NO: 375 - DNA, 401 bp, Mycobacterium tuberculosis H37Rv
aatgcccccgaaatgcccattttcgggggcttttgcgtctgctcgcgggcccttggcggccggtgggtacgctgggtgaatatggttgcctttctgccttccattcccgttgtcgaggacctacgcgccctggtcggccgggttgataccgcccgccaccacggtgtacccaacggctgcgtgctcgaattcaacctgcgatcggtgccgccggagacgacgggcttcgaccctcttacggtgctcaccgggggtgggcggccgatggcgctgcgcgatgcggtcgccgcgatccaccgtgccgccgaggacccccgggtagccgggctgatagcccgcgtgcagcttccgccctcgccggcgggggcggttcaggagctgcgggaggccatcgcggcctt

SEQ ID NO: 376 - DNA, 401 bp, Mycobacterium tuberculosis H37Rv
gtgcgcccaggtcgtcggcgaccatccgcgcctgccgggcctcggtgttccaggtggccccgccgatgtggggggtgaggacgacattgggcatgctcaccaaagggtgatcggtcggcagccattcaccggtgaagtggtccaggccggcggcggccagcttgccgccacgcagggcgtcgacgagcgcatcggtgtcgcgcagctgggaccgggcggtgttgagaaacaccgcaccgtcgcgcatggccgcgaactgctgggcaccgatcatcccgatcgtgtcgtcggtgaccgccgcgtgcatggagacgatgtcagcctcggccagcagctcgtcaaggctgtggccggcgtcgtcgcggtaaggatcgtgcgcgatgacccgcaggcccagcccg

SEQ ID NO: 377 - DNA, 401 bp, Mycobacterium tuberculosis H37Rv
acccgacacccgggcactggccgttgccgcgatggtgccatcgctgaccgctgtcgatcccgctggccggccgatcacacccgggctgctgtacggcgacgccaggggtcgggtaccgaacgcctcggtggcacgggcgcagtcggtgccgtcggtgggtgagaccgccgagtttctgcgctggacggccggccaagcgctggatgcgtccgggtactggccggcgccggcggtggccaattacgccttgtcgggcgaagcggtcatcgactatgccacggccgtcacgactctcccgttgttcgacgggacgggatggaacgcgaccgcttgcgccgactgcggtgtgaccgttgaccggatgccgcgggtggagacgttcggagtgggagtggggcagg

SEQ ID NO: 378 - DNA, 401 bp, Mycobacterium tuberculosis H37Rv
cctccagatcggcgccggtggaaccgtgcagaacctgccctttgggggtaccgcggtgctgatcatgatcggtgtcggtttggatacggtcaagcagatcgagagtcagctcatgcagcgcaactacgaagggttcctcaagtgagagttttgttgctgggaccgcccggggcgggcaaggggacgcaggcggtgaagctggccgagaagctcgggatcccgcagatctccaccggcgaactcttccggcgcaacatcgaagagggcaccaagctcggcgtggaagccaaacgctacttggatgccggtgacttggtgccgtccgacttgaccaatgaactcgtcgacgaccggctgaacaatccggacgcggccaacggattcatcttggatggctatcc

SEQ ID NO: 379 - DNA, 401 bp, Mycobacterium tuberculosis H37Rv
tgtactgcggcaatgacaagtacgggctgctgcacattcaggccaagcatggacgccaatggcacgatattgcggatgcacgatggccgagtgcaggcaattggcgctatctcgccgattacgcaatcggtgccacactggcctacccggagcgagtggagtacaaccaagacaacgacacgttcgccgtataccggagaatgtcgttgccagacggcagatacgttttcacaacccgcgtcattatttcggcacgcgacgggaagatcattacggccttcccgcagacgacgtgatgcgtcggttgggaactaagggaaggtgatggcgtgaccgggccaccgcgaagctatacagggcgccgggatctcatcgcggagaagctggagccgtactttcag

SEQ ID NO: 380 - DNA, 401 bp, Mycobacterium tuberculosis H37Rv
gagattaccggtcagcggcccggagaattcgtgttcgtgctcggctatctggggcatgtgcgggccatcgtgggcaactgttacatcgagatcatgccgatgggcaccagggtcgagctgagcaagttggccgatgtggcattggatatcggccgcagtgtcggatgctcggcctacgagaacgacttcacgctgccggacattccaacgcagtggcgcaaccagccgctgggctggtacacgcaaggccttgccccctacctgccggggctgtcggacccgaaagacgccgccgagggctgatgggtgtgccggcgacctctgagggcgagcagacgcataagcgcccaatttcgggctcttctgacccttccgtgggtggaaccttggtctgagtaggc

SEQ ID NO: 381 - DNA, 401 bp, Mycobacterium tuberculosis H37Rv
tatctggggcatgtgcgggccatcgtgggcaactgttacatcgagatcatgccgatgggcaccagggtcgagctgagcaagttggccgatgtggcattggatatcggccgcagtgtcggatgctcggcctacgagaacgacttcacgctgccggacattccaacgcagtggcgcaaccagccgctgggctggtacacgcaaggccttgccccctacctgccggggctgtcggacccgaaagacgccgccgagggctgatgggtgtgccggcgacctctgagggcgagcagacgcataagcgcccaatttcgggctcttctgacccttccgtgggtggaaccttggtctgagtaggcgcacgtcgttgtagcttaaggttgctggtttgtcaaaggtccgaa

SEQ ID NO: 382 - DNA, 401 bp, Mycobacterium tuberculosis H37Rv
ttcgctactgggcacccgccgatggctgccgacgtgcacgcacaccatctcgccgcggtcacacatgttgacgacatgctgccgcgataccccgagtatctgcgcggcctcactcgtcttcagcagagtctccatgtcccaatgctggctagtaaacccaaaaaacacaacatcgttgcggagcgtgatcgcaccggctgacgctagagcgagggccccagttccgcggccgacaggtggcagtgagctagctgccgcgcagcgtctcgatcactgcgctgaagtccaagtcggcgtgatcggcggcgaacttggcgtagatctgggcggcgtggctgcccagtggggccgccgcaccggtcgaggccaccgcttccatcgccaggcccaacatgccaggt

SEQ ID NO: 383 - DNA, 401 bp, Mycobacterium tuberculosis H37Rv
catcagaatcagtgtctatggtcatcgggggtgtcgtgggcgctggcccgctgactcgggtgggaggtggcacatgtcgttcgtgctggcgatgccggaggtgttggggtcggcggcaacggatctggccgctctgggctcggtgctgggcgcggccgatgcggccgcggcggctacgacgacgggcatcgtggccgcggcccaggatgaggtgtcggcggcgatcgcggcgttgttttccgcccacggccgggcctatcaggtggccagtgcgcaggcggcggcggttcacgcccagttcgtggaggcgttgagcgcgggtgcgggggcctacgccagcgcggaggccgccggcgcggcggtgctggccaacccggcgcagagcgtgcagcaggacctgc

SEQ ID NO: 384 - DNA, 401 bp, Mycobacterium tuberculosis H37Rv
cggcggagccagcaccgtactcggcggcaccggcgggggaggcggggtcggtgggctgtggggcgccggtggggccggcggggccggtggaaccggccttgttggtggcgacggcggggccggtggggccggcgggaccggcggactgctggccgggctgatcggtgccggcggaggtcacggcgggaccggcgggctcagcactaatggcgacggcggggttggcggggccggcgggaatgccggaatgctcgccgggccgggcggcgccggcggagccggcggtgacggcgaaaacctggacaccggtggggacggcggggccggcggtagcgcagggctgctgttcggcagcggcggcgccggcggcgccggcggatttggtttcctcggtggggacg

SEQ ID NO: 385 - DNA, 401 bp, Mycobacterium tuberculosis H37Rv
tgctgcgatattgagccggccgccgttgaggccgctcatcgcgataccgaagccggcgccttcgccgtcggcgccgcccagcatggcctcggcgggtacccgcaccccgtccagcaccacctgcgcggtgggttgggcatgccaacccatcttcgcttcgggcgcgccgaaactcagccccggtgtgcccttttcgacgatgaacgccgacacgccgcgcggaccctcggcgcccgtgcgcgccatcaccacatacacgtccgatgctgcggccccggaaatgaattgtttgacgccatcgagcacgtagtcgccgccttttcctgagccgtgcctgacggcgcgggtgctcagtgcgccggcatcggatccggcgcccggttcggtcaggcagtagctgg

SEQ ID NO: 386 - DNA, 401 bp, Mycobacterium tuberculosis H37Rv
tcagtgcgccggcatcggatccggcgcccggttcggtcaggcagtagctggcgatgacgcccatggtggccagtcgcggaatccagtccttgcgttgctcgtcggtgccgaagctgtcaatcatccacgcgcacatgttgtggatggacaaaaacgcggcggtcaccgggtcggcgatcgccaactgctcgaagatgcgcacgccgtcgagccggcgcagcccactgccgccgacgtcgtcgcggcaatagatcgcggccatgccgagttcggccgcttcccgcaacacgtccaccggaaagtgtttggcggcatcccattccagggcgtgcggagccaggcgtttgccggcgaaggcggccgccgtctcgacgatcacccgttcgtcgtcgttaaggaca

SEQ ID NO: 387 - DNA, 401 bp, Mycobacterium tuberculosis H37Rv
ttgtggggatgacgaattcggcaccgtccttgatgcctgacggccatcgcgacgtgacggtcttgaccttggtgtagaactggattgccgccgggccgtgctggttgaggtcgccgaagccggagcgcttccagccgccgaaagtgtggtaggccaccggcaccgggatcggcacgttgacgccgaccatgcccacctgcacccgggagacgaagtcgcgggccgcgtcgccgtcgcgggtgaagatcgccaccccgttgccgtattcgtgctccgacggcagccgcaacgcctcttcgtagtcgcgggcgcgaaccatgcacaacaccggcccgaagatttcgtcggtgtagatcgacatgtgggcagcgacatggtcgaacagggtcggcccgatgaag

SEQ ID NO: 388 - DNA, 401 bp, Mycobacterium tuberculosis H37Rv
atgaggtcggcgcggctgtggtccagttcccacatgcggtggctgacgacgtgatcgacgctacgggccacccctatctaagcggcctgccgatcggtctgcccagcctgatcccatgaccgcgagcgaccaataggtccccacatggcccggaggccgctgccagcattgacccgacgatgccggcccgcaggcttccctgatcgtgcggaacctgctcggccgtgcatgggacatccagatcggattgcctccgggtacggcgtacgccggacccggtcgccgggacgataccgggctagtgttagctagcggtggaaaaagcccgacacgaaatcgatcgaattaaagccaccagaatcctgctttccagagttcccgaaacccgatgtggcgctgtt

SEQ ID NO: 389 - DNA, 401 bp, Mycobacterium tuberculosis H37Rv
tggcttcaagattaccgaagcccgactgtagaaaacccgtattgccaaagcccgacatgaatccactgaacaggccggttcccttgttcccgaaacccgatgttacactaaccgaattgttgtaacccgttaccgattggcccgagttggcgaagcccgagatttgtaaattaccaacgttttgggcgccggagtttcccctaccagaattattgaaacccgaatttccactgccggcgtttccgaatcccgagttttcgcccagcccatcggtagtattgccgaaaccggtgttcaggttgcccgcgttaaagccgcccgtgttgatattgccagaatttgcgaagccggtgttcgtcaggccagagttcaagaaaccagaattagcgtctcctccgttg

SEQ ID NO: 390 - DNA, 401 bp, Mycobacterium tuberculosis H37Rv
agcgcctccatcccgggtgtcagccgcgccaacgtgtcggcgacgtcggcgagctgttcgagcggtccgtccttggccgttatcttgtcgatcagtccgccttcggccagcagccggtcggccagcccgtcttcggagagcacccgctcgataagtccgtcctcggcgagcagctggtcggccagtccgcccggttgcagcgcgcgctgcatggcgccgccttcagcggtcaggcggtcgagtaagccgccgggctgggtcagcaggtcgaccaccccgccgggccgcagcatccggtccatcggcccgttgggcgcgatggcgcgtcccagcggcatatcgtcgtccaatagcctggccagccggttggcgcgggcaatcgtgtcatcgattcccagcat

SEQ ID NO: 391 - DNA, 401 bp, Mycobacterium tuberculosis H37Rv
catgtcaaccgccgcgccggccatgttcaaaccggtgtcggcggcggcgagccccgctcgtgcgggccaggtcgcaatacccacgagggtttggccgaggttcattctgcgagtgtattcacggcgcgccgtggattgagcggcaacggtccaagctgatttggcgattcctggcagactgttagcagactactggcaacgagctttcaggaattacacaatgactgtgaaggtaacgttcaaccaatgcggaaaggggttgatctcgtgacggcgggaaccccaggcgaaaacaccacaccggaggctcgtgtcctcgtggtcgatgatgaggccaacatcgttgaactgctgtcggtgagcctcaagttccagggctttgaagtctacaccgcgaccaa

SEQ ID NO: 392 - DNA, 401 bp, Mycobacterium tuberculosis H37Rv
accttcgaggaaggctgcccctacgggtacgcctggtcgcagccacgctgatcctggtggccactggacttgtggcctcggggatcgcggtcacctcgatgttgcagcaccggctgaccagccggatcgatcgggtgttgctcgaggaagcccaaatctgggcgcagatcacgctgcccttggcgccggacccctaccctggtcataaccccgatcggccgccgtcgaggttctacgttcgggtgatcagccccgacggccagagctatacggcactcaacgacaacactgccataccggcggtgcccgccaacaatgatgtcggccggcacccgacgacgctgccatcgatcggcggatccaagactttatggcgcgcggtctcggtgcgcgcgtcggat

SEQ ID NO: 393 - DNA, 401 bp, Mycobacterium tuberculosis H37Rv
ccttcgaggaaggctgcccctacgggtacgcctggtcgcagccacgctgatcctggtggccactggacttgtggcctcggggatcgcggtcacctcgatgttgcagcaccggctgaccagccggatcgatcgggtgttgctcgaggaagcccaaatctgggcgcagatcacgctgcccttggcgccggacccctaccctggtcataaccccgatcggccgccgtcgaggttctacgttcgggtgatcagccccgacggccagagctatacggcactcaacgacaacactgccataccggcggtgcccgccaacaatgatgtcggccggcacccgacgacgctgccatcgatcggcggatccaagactttatggcgcgcggtctcggtgcgcgcgtcggatg

SEQ ID NO: 394 - DNA, 401 bp, Mycobacterium tuberculosis H37Rv
aggttccagtacccacgcatgttggtgatcaaaccggccttattcacccggtaggtgaacacgccgcggacctcactggtaaagccgccgtcaaactcgctgtgcaacaccagaatgtgggcgatctcgtccggtgagctggacgggaacgtctcctcgcaggtgaccgtcaaccgattggccgcaatgtgtgtgtcgaagaaggcgccgacggcctccttacctttgatgccgctgccatcgggattggtgacggacttgccgatcggatcctcgatgacgacgtcgtcggccatcagcgccagccagccctcccggtcgtgggcttggacgcaccgccacgacgactgcgacgcgatcagggccggggattgggtcgtttgggtcatggctatctccgg

SEQ ID NO: 395 - DNA, 401 bp, Mycobacterium tuberculosis H37Rv
aaattagctagcgggttgacagcgcagaaaggaagccatgttcgacagcaaggtggctatcgtcaccggggctgcccagggtatcgggcaggcctacgctcaggcgttggcccgcgaaggtgcctcggtggtcgtcgctgacatcaacgccgacggtgccgcggcggtagccaagcagattgtcgccgacggcggtactgcgattcatgtgcccgttgacgtgtccgacgaggattccgctaaagccatggtcgaccgcgccgtcggtgctttcggcggcatcgactatctggtgaacaatgcggcgatctacggtggcatgaagctcgatctgttgttgaccgtgccgttggactactacaagaaattcatgagcgtcaaccacgacggcgtgctggtgt

SEQ ID NO: 396 - DNA, 401 bp, Mycobacterium tuberculosis H37Rv
cgtcgccgaagccgacatcatcagcatcaccgtgttcgacgacgcgcaggtgagttcggtgatcaccgccgacaacggactggcgacgcacgccaagcccggcactattgtcgcgattcactccaccatcgccgacacgacagcagtcgatctggccgaaaagctcaagccgcaggggatccacatcgtggatgcaccggtcagcggcggcgcggcggcggccgccaagggtgagttggccgtgatggtcggcgctgacgacgaggcgttccagcggattaaagagccattttcgaggtgggcttcgctgttgattcatgccggggaaccgggcgctggcacccggatgaaactggcgcgcaacatgttgactttcgtctcttatgccgccgccgccgagg

SEQ ID NO: 397 - DNA, 401 bp, Mycobacterium tuberculosis H37Rv
gaacccaccgttgtgcccgccaggggagaagccgcccgccggcgggtggggcagctgcgccacgaactgcttggttgcggcataaaacggatcgctgttgccgcaatcgacccggatcgggatggaccccaatgcggggagtccgaaaaccgagttcgccgaccagtcgtcgggtccgtcgaaggagccgggtgcgacggaaccggcggatagccacagtgccgggctgaccgcgcagatcgctgcggtgcgtgccggtccaaggcggctgccgagcagcaaagcgccgtagccgcccatcgaccagcccagaaacgctacccgggaggtgtccagccgctgggtgtccaatagcggaatgagctcgttgagcaccattgcccccgcgtcctcgccagaag

SEQ ID NO: 398 - DNA, 401 bp, Mycobacterium tuberculosis H37Rv
ccgcgcagatcgctgcggtgcgtgccggtccaaggcggctgccgagcagcaaagcgccgtagccgcccatcgaccagcccagaaacgctacccgggaggtgtccagccgctgggtgtccaatagcggaatgagctcgttgagcaccattgcccccgcgtcctcgccagaagcccgctggtgccagtagctgctgcctccgtccacggagaccaccgcgaacggtggcaacccggcgttgacggcctgggccaggccctgctcgacgccgccgtccatcacggccgatgcgctaccgcccaagccgtgcagtgcgatcacgggccgcaacgcctgggtctggccgggtgggcgggcgatggcccagttggtcatcttcccggcgcgcgctgccgacacgaac

SEQ ID NO: 399 - DNA, 401 bp, Mycobacterium tuberculosis H37Rv
ggtgggcgggcgatggcccagttggtcatcttcccggcgcgcgctgccgacacgaacgagccggtggacatcgtcggcgccgcctgagccgggggggccggatcgagtgctggtgtcggcgccaatggaacgtttgtgccaatcgccgccgccggtgcggcatgtgaagttcggggctgcaacagcatgtcgatcgcatatgctgaggtagcgccaaggaccgtgccggcgccgagaccgagcacggcgcggcggctcaactctggcatgcgggccatcatgccatggacgtttggccgaattggcaatgcagtaccactttgactggcagcatggatgggcgtgacagcagcggtcactccaaaaggagaacgtcggcggtatgcgttggtcagcgccgc

SEQ ID NO: 400 - DNA, 401 bp, Mycobacterium tuberculosis H37Rv
cggtgatcggccgcgagttggatcgttatctgccgttcctggccaccactaaggtgctaatggcggccgtgcgcgcggggatgggtcgcgagtccgcgcaccggttgatctccgagcacgcggtggcgacggcgctggccatgcgagaacacggcgcggagcccgacctgctggaccggttggccgccgatccgcggctgacgctgggacgagacgctttggaggccgcgctggccgacaagaaggcatttgccggtgccgcgggtgaccaggtcgatgatgtggtcgcgatggtggacgcgctggtgagccgttacccggacgcggctaaatacacgccgggtgcaattctttagtgtcatgactaccgccgccgggctttcgggcatcgatctgaccga

SEQ ID NO: 401 - DNA, 401 bp, Mycobacterium tuberculosis H37Rv
cgtcatcgtcatgttggcctgcgcgaccgctcggttctggaacaagcgcatgtctatgagcggatgttctgtgcggtaccacgaatgtgcgacgaatgccgcgatcaacgccaggccggtgatcgccggtatcaacacgtgccgatcggccatcgttccacgggcggggctagatgacaccccgaacaggaaggtcgccaggcccggcgacagcaacaagaggcccatgtagtcgaagttttccgacgctgccgggcgatctcttgggaacacgatcgccgccaagacgagcgcggacagcccgaccggcaggttgaccaagaaaatccaacgccagccgtaggccccgatgagccaaccacccaggatcggcccaccgaccgggccgagcagcatcggaa

SEQ ID NO: 402 - DNA, 401 bp, Mycobacterium tuberculosis H37Rv
gtcatcgtcatgttggcctgcgcgaccgctcggttctggaacaagcgcatgtctatgagcggatgttctgtgcggtaccacgaatgtgcgacgaatgccgcgatcaacgccaggccggtgatcgccggtatcaacacgtgccgatcggccatcgttccacgggcggggctagatgacaccccgaacaggaaggtcgccaggcccggcgacagcaacaagaggcccatgtagtcgaagttttccgacgctgccgggcgatctcttgggaacacgatcgccgccaagacgagcgcggacagcccgaccggcaggttgaccaagaaaatccaacgccagccgtaggccccgatgagccaaccacccaggatcggcccaccgaccgggccgagcagcatcggaat

SEQ ID NO: 403 - DNA, 401 bp, Mycobacterium tuberculosis H37Rv
ggctggtgggccgagcagttcgatggcacgacgcgtgaactgctgcccggcgaattcgtcgtggtcgcccggaccgatggaccgcggttgggattccagaaggtgcccgatcccgcccctgggaaaaaccgcgtgcacctcgacttcacgaccaaggacctggatgccgaggtgttgcgcctggtcgccgccggagccagtgaggtcgggcggcatcaggtcggcgagagctttcgctgggtggtgctggctgaccccgaaggcaacgctttttgcgtggcgggtcaataacgaggcggttccaaggggccgaaaagcggccggcagcggtcgaacccgtccacccgaacctcaacagtgcgatggcgctgccaatcgtcgcgggtcagccggaataacag

SEQ ID NO: 404 - DNA, 401 bp, Mycobacterium tuberculosis H37Rv
ccggtcatcagcgcgtaatagtggtagaacgagttggtcaccgagatgtcggtgtcggagcggaacgggctggccgcggtgcgggcgaattcctccgggaattcccgctccatctcgatcagcacactcttgcgcaacggtaccgcggtgtgctcgagatgacgggtaatcacctgcccgaaccggtcgaagagcagctgccggtttacccgggccgcgttttcaaagccactacgcgctgggttgttggcgccgagcccgatccgggtcttggcttcgatgaacctggtgactccaccgggagagaagaacatactggccttgagcggccggccgaagaacatgtcgtcgttggagtacaagaagtgctcgctgagccccgggatgtggtgcagctggct

SEQ ID NO: 405 - DNA, 401 bp, Mycobacterium tuberculosis H37Rv
ctgcgcgaggccggtgcggtcgaattgcatgtgcgcatcgcctcgccaccggtgaagtggccgtgcttctacggtatcgacttcccctcgccggccgagttgatcgccaacgccgtggaaaacgaggacgagatgctggaggcggtacggcatgccatcggggccgacacgctgggatacatctcgctgcggggcatggtcgcggcgtccgagcagcccacgtcgcggctgtgcaccgcttgcttcgacggcaagtatccaatagagctgccccgcgagaccgcgctaggcaaaaatgtcatcgagcacatgctcgccaatgcggcccgcggagccgcgctgggcgaactcgccgccgacgacgaagtccccgttgggcgctgacaaaacgcacgcgcggt

SEQ ID NO: 406 - DNA, 401 bp, Mycobacterium tuberculosis H37Rv
gtgcggggggcagctccgtggtgctagcgccgccagtcgtcctcatcgttccacgagtcgtcgtccgacgggccgtcgccgtccagtcggtcggtaccggtacctgacagctcacgctgaagccgctggaagtcggtctgcggggagctgtatttcaattctcgagcaaccttggtctgctttgccttagcccggccgcggcccatgggggaaccccctcgcgaaataacggagcggcctaacgagtaggcggctccgatctctggtgtcgtttattgtcctgccgacagtttaccgtgccgcccggtcgggcgcggggcggcctgcccgccgttacggagggcacgggtaatcaccgaataccgccgcgcagccgctcgacggcccgccgtccggcgccc

SEQ ID NO: 407 - DNA, 401 bp, Mycobacterium tuberculosis H37Rv
gccggccgaggcgtcttcgttgctggaggcgggaaacgcagacgctgtgctcgtcgacgcgcgcaacgacctgtcgtccgggcgaggcctgtgccgcctgttgagctcgaccggccggtcgatcccggtactggcggtggtgagcgaaggcgggctggtggcggtcagcgctgactgggggctggacgagatcctgctgctcagcaccgggcccgctgagatcgacgccagactgcggctggtggttggccggcgcggagatctggctgaccaggagagtctgggcaaggtgagcctgggcgagctggtgatcgacgaaggcacctacaccgcccggctgcgtggccgcccgctggatctcacctacaaagagttcgagctgctgaaatacctggcgcagc

SEQ ID NO: 408 - DNA, 401 bp, Mycobacterium tuberculosis H37Rv
ttcaccacctacagcgtcgataccgcctacgcgctggctggcacggataactgaccgaagatgttcccccccaagaagtcgtaagcaggagcttaagtggccaagcggttggacctcacggacgtcaacatctactacgggtcatttcatgcggtcgctgatgtgtcgctggcgattctgccccgcagcgtcacggcgttcatcggtccctcgggctgcggcaagacgacggtgctgcgcaccttgaaccggatgcatgaggtcatccccggagctcgagtcgagggtgccgtactgctcgatgatcaagatatctacgcccccggtatcgacccggtcggtgtccgccgggcaatcgggatggtgtttcagcggccgaatccattccccgccatgtcgat

SEQ ID NO: 409 - DNA, 401 bp, Mycobacterium tuberculosis H37Rv
aatcgcaaggtgctcgacgatacggccgaatcctcgctgcgcggcgcaaacctgtgggacgaggtcaaggatcgactggataaacccggcggcggattgtctggggggcagcagcagcggttgtgcatcgcacgggcaatcgccgtgcaacccgacgtgttgctgatggacgagccctgctcctcgctggacccaatctccaccatggccatcgaagacctgatcagcgagctcaagcagcagtacaccatcgtcatcgtcacccataacatgcagcaggctgcccgggtgagtgatcagacggcattcttcaacctggaagcggtgggaaagccggggcggctggtagagatcgccagcaccgagaaaatcttctccaacccgaaccagaaggccaccga

SEQ ID NO: 410 - DNA, 401 bp, Mycobacterium tuberculosis H37Rv
cgggcgacgttcggcggatccgcaatggccgcactcgagccgatccggttagctgcttgccgggtagctcgggttcacggcgggcgtggtcggcgcgcggatagttggctgcccggaggtcgggaagctccgagaggaactcgagcgagtgggccgggatggcgatagcctcggtgtcctgctggtcgtcggcgtcgtcgtggaccttcgggccgcggccggatggctcgggttcgggggcgacatggcggtgcgtggggaggtcaggaaaagcggggccgagcctggcgatcagatcggccacactaacggcgccggtggcatgacagccgacattctgggtgtcccgcggaccctgggctgccacccatgtggcgggcggtaccgtgatccatcggtca

SEQ ID NO: 411 - DNA, 401 bp, Mycobacterium tuberculosis H37Rv
actaacggcgccggtggcatgacagccgacattctgggtgtcccgcggaccctgggctgccacccatgtggcgggcggtaccgtgatccatcggtcaacaccatcggggaatgctgactcggagagccgtgcccacggcgcggcgctctcgccgtcactcatgtcctaccggcctccgagagtctaggtggcggacgcccgcggtgttggctgcgtgtcctacgcgcaccttcgcgcagcaccgccacgagtcggcgccgcacaatgcagcaaggcccacatcgtactgatttatcggtccagacgcgatttcgacagggtctcgattcagccacccgaccccatggcgtccgccccttccggcactcggcagtcgtcggggtcggttagccagccgtcgg

SEQ ID NO: 412 - DNA, 401 bp, Mycobacterium tuberculosis H37Rv
tttcgacagggtctcgattcagccacccgaccccatggcgtccgccccttccggcactcggcagtcgtcggggtcggttagccagccgtcgggaagggccacccgggcgggggaaccctgccggccccgggcgccagtcgcggagtccgggaacggtaccgtgccgtccaaccggtccagcaggcagtcgagctcgtcgaacgtcttgaccattgctaacgcccgccggagcgcggagcccgccgggaagccatggagataccaggcgatgtgcttgcggatatcgcgcatgcccttgtcctcgccgaagtgtgcggccagcaaggtgccgtgacggcggatgatgtcggcgacttcgccgagcgtgggtggggtgggggccgggctgccggtgaaagccg

SEQ ID NO: 413 - DNA, 401 bp, Mycobacterium tuberculosis H37Rv
actcggcagtcgtcggggtcggttagccagccgtcgggaagggccacccgggcgggggaaccctgccggccccgggcgccagtcgcggagtccgggaacggtaccgtgccgtccaaccggtccagcaggcagtcgagctcgtcgaacgtcttgaccattgctaacgcccgccggagcgcggagcccgccgggaagccatggagataccaggcgatgtgcttgcggatatcgcgcatgcccttgtcctcgccgaagtgtgcggccagcaaggtgccgtgacggcggatgatgtcggcgacttcgccgagcgtgggtggggtgggggccgggctgccggtgaaagccgcggacaactcggcaaatagccagggacggcccaggcagccacggccgatgaccac

SEQ ID NO: 414 - DNA, 401 bp, Mycobacterium tuberculosis H37Rv
cgcggtacgggcgtgcagcgcgaccgcagcggctccttcggcctcagcgatgcggccggcatccagatgtgtgtggtgggcgtcatcgatgccaatgcgaaacttgaccgtcaccggtatatcggtgccttcggtggcgcgcacagccgcggccacgatctgaccgaatagccgccgtttgaacggtagcgccgccccgccgccgcgcttggtgactttgggcactgggcagccgaaattcatgtcgatgtgatcggctaacccttcgccagcgatcatccgagcggccgcatacgtggtgtccggatcgacggtgtacagctgcagcgagcgtggtgattcgtccgcggagaacgttgtcatgtgcatggtgaccgggtgccgctcgatgagcgcacgtg

SEQ ID NO: 415 - DNA, 401 bp, Mycobacterium tuberculosis H37Rv
ccgccgagcgcgtagtagttcttcccgtccgaccacgggatgtagtcgtgcgggttccagggcttgtgcatgctcaggtgccggttcaggtacttctcgacgaccggttcaagttcgtgcagcagctgcaggtcggtcagcttggctgacatggcgcctccagttatctgtgtctaatggttgcagtcaatatatctgtgtctctcggtagcatcaagtttgggcttcgcgcggcatgttgagctgccagcagcgggcaggatgctggcatcggcgggccccggtggccgcgtggggtgaaccccagtcgtcctcagttgtgcggcccggctgggatggagtgttcggattctccccgctcgcggtgcggtgcgtaggtggcggcggtgctgagcaacatg

SEQ ID NO: 416 - DNA, 401 bp, Mycobacterium tuberculosis H37Rv
ccagtgacccaagatacgtctgctacctgtccgctgaccagcaccgtgcaggattcctcgccggttgcgggccagcttggcaggcctatagggttccgcggactggccggcggttgccccgtgtcaccgctgggttacgaatcgccgccgctgccgctggggccggattcgctgacgtggcgatacttcggtgactggcgcgggatgctgcagggaccgtgggcgggatccatgcagaatatgcatccgcagctgggcgcggcggtcgaagatcattcgacgttcttccgggaacgctggccacggctgctgcggtcgttgtacccgatcggcggagttgtcttcgacggcgatcgagccccagtcaccggtgtgcaggtgcgtgactaccacatcaccat

SEQ ID NO: 417 - DNA, 401 bp, Mycobacterium tuberculosis H37Rv
gttccgcggactggccggcggttgccccgtgtcaccgctgggttacgaatcgccgccgctgccgctggggccggattcgctgacgtggcgatacttcggtgactggcgcgggatgctgcagggaccgtgggcgggatccatgcagaatatgcatccgcagctgggcgcggcggtcgaagatcattcgacgttcttccgggaacgctggccacggctgctgcggtcgttgtacccgatcggcggagttgtcttcgacggcgatcgagccccagtcaccggtgtgcaggtgcgtgactaccacatcaccatcaagggtgtcgacggtgcgggccgtcgctaccacgcgttgaatcccgacgtcttctactgggcgcacgccaccttctttgtcggcacgttgc

SEQ ID NO: 418 - DNA, 401 bp, Mycobacterium tuberculosis H37Rv
gctcgacctgaccgaactacccaaaccgccattcgcccaacgagttccggattggctgtgggccgcgccgcgcaagttgctggcccggttcttcgtctggctgaccgtcggactctacgatccgcccgtgcgcgagctgatgggctaccggtggttgcgccgcgacgaatggttgcaccgccgctttggcgacatcgtccggctcgtctttgccttggtgccattccggtttcgcaagcacccgcgggctcgcgccggctgggaccgtgccaccggccgcatccccgccgatgcgccgctagtacagacgcccgcgcgcaacctgccgccgcccgacgagcgtgacaacccgacgcactactgccctaaggtctgaccccggacctgcggcgcaaccgggg

SEQ ID NO: 419 - DNA, 401 bp, Mycobacterium tuberculosis H37Rv
aacacagcaaggccctgtggcgcagttggttagcgcgccgccctgtcacggcggaggtcgcgggttcgagtcccgtcagggtcgccaggacggtgaggcacatgctgccttccggccaggtagctcagtcggtatgagcgtccgcctgaaaagcggaaggtcggcggttcgatcccgcccctggccaccatggtctacctggataggcactgtggcggcactgctacgtagccgacctccctgggtctgggtgattggtcccgggctgcgatggtcgtgagcacacgcccggatcaccgatgccgtcccgccccggtaggccatcgcggcgatgatcgagattgccggccgggttgatcgctgcggattccacccgggtcgaacggcgggtccatctgctc

SEQ ID NO: 420 - DNA, 401 bp, Mycobacterium tuberculosis H37Rv
atcgacgaccgtcacaagtcgacacgccgaacgtgcaaccacggcggcatcacctggcgtgtcgccgccaccagcgcacgctcggcacggagtttagcaactactcatccagaagccggccactacggcctggccacctggtttacccgcatggacgcgatgaccgcaccgacctgagtcggcattgctggttgcgctcatccggttatggcaagccgttctgtcccggcgcgccaaacaccccggccttgccaccggtaccgccggctccgccgttgacgccgttgccgccgttgccaccgtagccgagggtagacggggcgagcatgccgttgacaactatcgtcgtgtcgccgccgttgccgccggtgttagccccgaagccggtgccggcgttgccg

SEQ ID NO: 421 - DNA, 401 bp, Mycobacterium tuberculosis H37Rv
acccccagggcgccaccaccgtcgccgccggcgccgccgatgccgatgcccaggatcacgggtgagctcaacccgccaccgccaccggcccccccgttgccgccggtcccggtggcggtgccgccagctccgccggcgccgccgtgcagcacggagaaccctaggaagtttgcgatgccagcgccggcgccgccgaagccgccggctccgccggtggcgccgtccccggtggcggcaccaccagccccggcggcgccgccaaagcctaggccgaggacagcaatgccctcgaagacgccgtcaccgccggctccgccggtggcgccgctagtgccggcgccgccctgcgcgcccgcaccgccgatggcgatggcgatcccgaaggggctgctggcggtgcc

SEQ ID NO: 422 - DNA, 401 bp, Mycobacterium tuberculosis H37Rv
atcccgaaggggctggcggcgccaccagagccaccggcaccgccggcaccgccgcttcccatggccgagtcgccgccctgaccgccggacccgcccaggccaaggaacagccccaatgcgttgctgccggcgccgccggcaccgccggttccagtggtagcggccccgccggcgccaccggcgccaccgatggctaccagcgcgccgccggctccaccggcgccgccgaccccgccgttcccgactccgctggcggccccgccagctccgccgttgccgccaatgccgaacatcagcgcgttgccacccgccccaccggacccgccgccggacccgccggccccgccagctccgccgctaccccacagccacccgccggtgccgcctttgccacccgaggc

SEQ ID NO: 423 - DNA, 401 bp, Mycobacterium tuberculosis H37Rv
ggcgcgcgctggccagtgtggcgatcagtcgtgtgttgctccactgctgccaagtcggccgtcatcgtctgctgtgcggccatcgcgaccacggcatgctcgtttcaagccacatcgacccagccgagcaccgcacccccgacatcgcgggtcgattcgttgatcgtcagcatcgaagacgtacggcgcatcgccaactatgaggagctcgccgcacattttcagaccgacttgcgtgaaccgccggaggcggacacgaacgttccgggcccctgtcgtgtggtgggcagcagtgatcgcaccttcggaaccgactggtcagagttccgtagcgcgggttaccacggcgttaccgacgacctcagaccgggcgggccggtcatggtcgagacggttagcca

SEQ ID NO: 424 - DNA, 401 bp, Mycobacterium tuberculosis H37Rv
ctggtcagagttccgtagcgcgggttaccacggcgttaccgacgacctcagaccgggcgggccggtcatggtcgagacggttagccaggcgatagcgctgtacccggacccgagtacggcgcgcggtgtgttccatcggctcgagtcgtcgctggcagaatgtgctggcttgcatgacccctacttcgatttcatcctcgacaggccggacgcctccaccgtgaggatcggcgctgcgggttggagtcatgtgtatcgcctgaaatcgtcggtattcatatccgttggcgtgttgggtattgaaccggcagagccgatcgccaacgtcatcttgcagacgatcagcgatcgcatccagtagttagccgaggactggaaagcagcagcggcggcgacgagcg

SEQ ID NO: 425 - DNA, 401 bp, Mycobacterium tuberculosis H37Rv
taaccaggcgagccgccaccgtacgacagtcgcagtcgctaagacttgctgctgcatccaactcgtggcggccttcattgatcccgactaccaccctgcctaaccaattctgtatgacgcgccgtttgagaacgtacatttgtgattgcggttcgcatttaggagcccggcgtgagctggtcgagtaacgcctcgaccagcgggcgccgcgaagctgtggtggtgggctagcccggtcgacccacggcgaagtgctgggccagcaggtcgtggtcggcctgtgtggcgcgcgtcgccagcacggcggcctccggtgcgctgacactggcgcgcatgtcgtggccgagcagcgcggcagcggcggtgcgtaggtcgaagtcgtgacggcgtagcgcccactg

SEQ ID NO: 426 - DNA, 401 bp, Mycobacterium tuberculosis H37Rv
gtcgcagtcgctaagacttgctgctgcatccaactcgtggcggccttcattgatcccgactaccaccctgcctaaccaattctgtatgacgcgccgtttgagaacgtacatttgtgattgcggttcgcatttaggagcccggcgtgagctggtcgagtaacgcctcgaccagcgggcgccgcgaagctgtggtggtgggctagcccggtcgacccacggcgaagtgctgggccagcaggtcgtggtcggcctgtgtggcgcgcgtcgccagcacggcggcctccggtgcgctgacactggcgcgcatgtcgtggccgagcagcgcggcagcggcggtgcgtaggtcgaagtcgtgacggcgtagcgcccactggtctggtttggcgtaaagccggtcgagg

SEQ ID NO: 427 - DNA, 401 bp, Mycobacterium tuberculosis H37Rv
ataccgaccgagacgccggcgctcgcggcgatcgcacgcagcggcgcgtcgaccagttgcggtgcgtcaagcagtacgcagacaacctgcgcgcgcttgggggtaaacgggttacgcggtccatcgctgtgcagtccgtcaccgagggtgcccggttgtgcggacacagctgaccgtcggccgcgcacgtcgatgagcaggccaccctggtgccgcaaataagcgttcccagctccgtcgatgtaccagagtccgcgagcccgcagcgtttcagcgctcgacggatgcagacgcgggcccaccacaagcagcggcgaaccagcgccggcggtatcccaggcctgcagtgctgccgttgccgacaggtgaggaaggtagagggcagtgatcgtgagggggtg

SEQ ID NO: 428 - DNA, 401 bp, Mycobacterium tuberculosis H37Rv
atgcgttcagtatatccgtacgttcagttttattgaacataatgatttattgaacatatcaggtcggagctggtcgacttggaaggtgtagcggtatccgagtcgcactcactgcctcctgccatgactcaccccaagggtgcaggttgtgcggcagtctgatgagttgccgcagcatcgttgccgcggcctcctcgttgcctgtctgaaacctcgtctgcagtcgaggggtggtcagcacgcgccgggccagacggactggtctactgcgccaaagcttgtcgctgcgcttggaggtcaggccgagcaggcgcgaggaacgacgaacccaacaagccatggtggttggcgccgtcgagaggtcggcggtcgccacaacgggaagatcgccttgagcgtcg

SEQ ID NO: 429 - DNA, 401 bp, Mycobacterium tuberculosis H37Rv
cgttcagtatatccgtacgttcagttttattgaacataatgatttattgaacatatcaggtcggagctggtcgacttggaaggtgtagcggtatccgagtcgcactcactgcctcctgccatgactcaccccaagggtgcaggttgtgcggcagtctgatgagttgccgcagcatcgttgccgcggcctcctcgttgcctgtctgaaacctcgtctgcagtcgaggggtggtcagcacgcgccgggccagacggactggtctactgcgccaaagcttgtcgctgcgcttggaggtcaggccgagcaggcgcgaggaacgacgaacccaacaagccatggtggttggcgccgtcgagaggtcggcggtcgccacaacgggaagatcgccttgagcgtcgctc

SEQ ID NO: 430 - DNA, 401 bp, Mycobacterium tuberculosis H37Rv
gaagatcgccttgagcgtcgctcgaccgccgcctcgagttgggtcataacgaagtagctgatgccgatcatgtcgacgtttccgtcgcatcagcgtgcagcggcgacccactcgacgaggtctcggtgccgccgcggccagggcaccagcagtgacgagtccaggcgccgtcgggccaagcagtcgcggtgccagccgtggtgggtcgggcgatggttgggtgtgctcatttcgggaacgccagggcgatcagcgtcggcaaactcgcgtcgatgtgcccgcggcgcaacaatccgcgacaatgatcgggtgcgtctgatcgggcggctccgtctgctcatggtggggctggtcgtcatctgcggggcttgcgcatgtgaccgcgtgtcggccggccgttg

SEQ ID NO: 431 - DNA, 401 bp, Mycobacterium tuberculosis H37Rv
cgcagttaccggcggactcggcttctgctggccggccggtcgggtgtgcccgtgcataccgctctcggcttcaccgtggctgtggccgtgtgcacaccgggtgagacgcccggttcgtggttgcggccagcatcgtgcaccacagcgctgcgccggccaaccgcggtcgctaccacggaatctggtcgatgacccctgtagttgcttcggtggttgtgccaatcatggcttcctacggcccgattcatggtgctcatctcttggccgcggtggtcgtggggtcggccggtgccgcgctgtgcctgccgttggcgcgggccctgcgccgaccgacccccagtgcaatgacgacggattgacggtgcggagcccggggatgtgctgagggcaccaatgtggtg

SEQ ID NO: 432 - DNA, 401 bp, Mycobacterium tuberculosis H37Rv
ggcacaggtcaacgatcctaacttgagttagtgaccacagcggcggccatcgcccgcgaggaccggttgcgttacaccggtccggagcgctgctcgggggacggacaagttcgagcggccggggatcgctattcgacggtgatctggctgctgggcggcaacttgctggtgcgctcggccggattcggctatccgttcctagcctaccacgtggctggacgaggacatggtgcgggagcggtcggcgcggtcgtggcggcctacggcctgggttgggcggtggggcagctgctgtgtgggtggttggtggaccgtgtcggggcgcgggtgacgctggtatccaccatgctggtggccgccgccgtgctggtgctgatggccgggctacacaccgtgccggg

SEQ ID NO: 433 - DNA, 401 bp, Mycobacterium tuberculosis H37Rv
caagcaatcgccgctgttggctatcggacacgcctacgccctgtggctgcgcgacaccggacgggtcacactctgcgtgacccaagactgtgatgttgatgccgatgccttcaacgaggccgcggacctagcggccgtgtggcaacttccggtggtgattctcgtcgaaaacattcgtggtgccctaagtgtgcacctggacaggtacacgcacgagcctcgggtttatcgccgggctgtggcctacggaatgccgggggtatcggtggacggcaacgacgtcgaagcggtccgtgactgtgtggccaacgcggtggttcgggctcgcgctggtggcggccccacgctggtccaagccatcacctaccgcaccaccgatttctctggatctgaccgcggcg

SEQ ID NO: 434 - DNA, 401 bp, Mycobacterium tuberculosis H37Rv
agccatcacctaccgcaccaccgatttctctggatctgaccgcggcggctatcgcgacctggccggatccgagcagtttctggatccgctgatcttcgcgagaaggcggctgattgctgctggcacgacccgcggtcggctcgacgagcaggagcgggcggcatgccaacaggtggccgatgccgtggcgttcgccaaggccagggcgcggcccaacggcggtgggccaatcagccgaccaacatccggctggcaccaacaaccaaagacccggttctgaggcctagatgtacgttggccgcggacaacgcggtcggtacatgccgtcgcgccgcggccccagctagtcgagcagcctctgccgcatcgcctcggcgaccgcggcagctcggtcgctgacg

SEQ ID NO: 435 - DNA, 401 bp, Mycobacterium tuberculosis H37Rv
gcccccgaccagcgagggcgccaccacgtcgcggcccttcgcgcaatcgagcaccgccttgacgatctcggtgcgagtcgaatccttgagcaggaatccggcggcgccctgttggagtgcctggtagacgatcgccggctcgtcgtgcgcggaaataagcagcacccgggttggcaactcgtagctgcgcaccgccgccgcaacctgcgcgccgtccatgccgggcatgcggtagtccagcaatgcgacgtcgggcaaatgggccttgatcaactccagggccgcggcgccgtcgtcggcctcgccgaccacgttcaccgagccactcaacgaaagcgctcgcacaacgccctcgcgaaataacgggtggtcgtcgccgaccaccacgcgcactttctccg

SEQ ID NO: 436 - DNA, 401 bp, Mycobacterium tuberculosis H37Rv
ggcggcggtggtgctggcctgtacgctagtcggattcgcagtcgcggtgctgggagaccccgtgatgctgcgcgcgattggatggcccgagacaatatttcggttcgcgctctatgcgttcctgtgcgccacggccttgatggtggttcgcatcgaggagcggcatacccgttcggttgccggcctgagtgcgttgcgggcggaactgcttgcccagacgatgacggcctcggaggtgctgcagcggcggattgcggaagccattcacgatggaccgctgcaagacgtgctggccgcgcgtcaggagctcatcgagttggatgccgtaacccccggcgacgagcgcgtcggacgcgcgttggccggactgcagagcgcgtcggagcggctgcggcaggcca

SEQ ID NO: 437 - DNA, 401 bp, Mycobacterium tuberculosis H37Rv
gtcggcgaccaggacggcgcgcatcttctgcttgggcagcactatcacggtgtccttgcgggcgccggggctgccgtcggccttgatcatctgaaaggtatggccgtgtaggtggattgggtgatacatcatggtggtgttatcgaacatcagggttggccgttggcctagccgcacgtgcagtggattggtcgtgctgtagggttccccgttgattgtccagtcgtacttggccatggtgccgcccaaggtgaccgggaggtcgtgggtgggttcgggccggcccaggttggcagtcgttgcggcggtgaacatttccacggtacccactcgccagttgagttcatccggccgaaactgcgggtcgggtgggctgccggcgccggtagacagcagcgcac

SEQ ID NO: 438 - DNA, 401 bp, Mycobacterium tuberculosis H37Rv
ggctagcgcaaagccgctggcgatgccggcgccgaggaagccgcgccggctgaaccgcctcttgtcgaaggcgttaccgctcgtggccagctcgggcatcgatcgctcctcgtctggatttggtctcgctcttcgtaccctgcccagacatcgggcagtacgcaacggttgatgatcaccacgccatcatccgcccttacaccctacccctatagggtatatagtgggccacgtggaaagcgggcacgtggtgtggatgcgatcggcgattgtcgcggtcgcgctgggggtgacggtagccgccgtcgccgctgcatgctggctcccccagctccaccgtcatgtggctcacccaaaccacccgttgacgacgtccgtaggtagcgaattcgtcatcaaca

SEQ ID NO: 439 - DNA, 401 bp, Mycobacterium tuberculosis H37Rv
gatgccaccgtgcccggaacggctcgcgacggcggtgctgccgcgctccgccactccggtgttactaccagacgtcgtggcggctgcgcccggcatgacagccgcgcttaccgaccccgtcgcgccggccgcgcgcggtccgccggcggcgcagggatccgttcgcaccggtcaagacctgttgacccggttctgcctggctcgtcgctgaggggtcagcgccaggcggtggtggccattcgccatcgccggtgaccgctgacccccatccagtgccgcgtgtgacttccggccccgatgcagaagcgacgatcactatgaacaacaacctgccgctggcaaatccggtaaacccaacaagcatcacctccaacccgcagatactcctggccaaccgggcg

SEQ ID NO: 440 - DNA, 401 bp, Mycobacterium tuberculosis H37Rv
gtacatggtcgaatgcgcgcgcgcccggggcgatatcgcgcccggtgccgcgatagtcgaatcaaccggtggcactctgggattgggcctagccctcgctggtaaggtgtaccggcacccggtcaccctggtcaccgacccggggctggaacccatcatcgcgcgcatgctgaccgcctacggcgccggcgtcgatatggtgacgcagccgcacccggtcggcggatggcaacaggcgcgcaaggaccgggttgcgcagctgatggccgaataccccggcgcgtggaatccgaaccagtacggcaaccccgacaacgtcggcgcctaccggtcgttggcgctggagctggtcgctcagcttggccggatcgatgtcctggtgtgctcggtggggacgggtg

SEQ ID NO: 441 - DNA, 401 bp, Mycobacterium tuberculosis H37Rv
gcactgtcgggcgaccggctggtggcgacccactacgggttctacagcaccatcgtgggcgtcggagtcctcgtcggaaatctggcgatcggatcgctcatgagcgccgcgcgccgcttaaataccgatgaaattgtttggggcggattgattctggtgggcatcgttgcggtggccgggctccgtcggttggacacattcacctcgggttcccagaacatgaccggtcggtgggctgcaccccggtgacccgcgatccacacagcccggactgcgggcgcgagggcagctaccgcgacaccatcacccgcccgttgaccgacctaccggtggccggctatccgttggtgccgcgggtcgcgtcgccccgctaccggtgcacaacgccgcagtgcgggcgt

SEQ ID NO: 442 - DNA, 401 bp, Mycobacterium tuberculosis H37Rv
acccactacgggttctacagcaccatcgtgggcgtcggagtcctcgtcggaaatctggcgatcggatcgctcatgagcgccgcgcgccgcttaaataccgatgaaattgtttggggcggattgattctggtgggcatcgttgcggtggccgggctccgtcggttggacacattcacctcgggttcccagaacatgaccggtcggtgggctgcaccccggtgacccgcgatccacacagcccggactgcgggcgcgagggcagctaccgcgacaccatcacccgcccgttgaccgacctaccggtggccggctatccgttggtgccgcgggtcgcgtcgccccgctaccggtgcacaacgccgcagtgcgggcgtgcggtattcaatcaggatctcgctaac

SEQ ID NO: 443 - DNA, 401 bp, Mycobacterium tuberculosis H37Rv
attgggcaccagcccggcaaaggacgcggtgaacaccacatgcccgcccgtgccctgctcaagcaacctcggcaggaacgcttcgaccgtatggatcgagccccacaggtcgacgtcgatcacccaacgccagtcgtcgtgcgtcatctccacgatcggaccgccgacaacgatgccggcgttgctgaatacgacatcgacgtggccgagcaggcggaaagcctcgtccgcgaggtgagtgacctcttctcgatgccggacgtcgcacatcacgctgtgcacatcgaacccctcggcacgcaggtggttcaccgcctgccgaagtcccggcttgtcaacgtcccctagcacgactctggctccgcggcgggcgaactcggtgccggtagccaacccgatgc

SEQ ID NO: 444 - DNA, 401 bp, Mycobacterium tuberculosis H37Rv
gaacgcttcgaccgtatggatcgagccccacaggtcgacgtcgatcacccaacgccagtcgtcgtgcgtcatctccacgatcggaccgccgacaacgatgccggcgttgctgaatacgacatcgacgtggccgagcaggcggaaagcctcgtccgcgaggtgagtgacctcttctcgatgccggacgtcgcacatcacgctgtgcacatcgaacccctcggcacgcaggtggttcaccgcctgccgaagtcccggcttgtcaacgtcccctagcacgactctggctccgcggcgggcgaactcggtgccggtagccaacccgatgccactggcaccgccagtgatgaccgcaccgcgcccgggaaacccgtccacagcacgcaaccctatttcaggcagtc

SEQ ID NO: 445 - DNA, 401 bp, Mycobacterium tuberculosis H37Rv
ggcgctgcccacccaccggatggtcgggtgggccacgatgtggtcgaggaattgcaggttgtagtcgccgggaacgccgaagatctcagagacgccgagttcggcgagccggtcgagtaggtagtcgccgacggtgtagacgggatcgctgcaggcatcgctcttctggggtgtcacgaagacgaccgtacgccggattgcggctattcccgactggacgccgattcgctatcgtgcggccatggccatcaaggagtcgcgcgacatagttatcgaagcaagtcccgaggagatcctggatgtcattgccgacttcgaagcgatgaccgaatggtcgccagcccatcagagcgtcgaaatactcgagaccggagacgacgggcggcccagcaaggtgaaga

SEQ ID NO: 446 - DNA, 401 bp, Mycobacterium tuberculosis H37Rv
aacaacgatcatttgaaggcacgatcgacggtgatcaccgcccatggtgtccagcaggccgcgcccgctccccgattttcccggacaccggccgggccggtcaggccgccgccggccgcagccacaccgatcgacgaaatcaactggtaaccacggtggctgccgaacaccgcccaccaacggcgcggcgttgctagcgtgaacgtcagtggccgtaaaagcatcgcgggaatttgtcatcgacgcgccttccagaagtggtgatggaggcgctggcagatgtcggcgtcctggcttcgtggtcaccgctgcacaaacaggtggaagtgatcgactactacccggatggccggccgcaccatgtgagggcaaccgtcaagattctggggctcgtcgacaaa

SEQ ID NO: 447 - DNA, 401 bp, Mycobacterium tuberculosis H37Rv
gactacaccttggccatcggcaagaccccgatcgtggtcaacgacagccgcggctttttcacctcgcgggtcatcggcacgttcgtcaacgaggcgctggcgatgctcggtgagggtgtcgagccggcttctatcgagcaggcggggtcgcaggccgggtatccggcgccgccgctgcagctgtccgacgagctcaacttggagctgatgcacaagatcgccgtcgccacccgtaagggtgttgaggacgccggcggcacgtaccagccgcatccggcggaggccgtggtggagaagatgatcgagctcggccggtccggccggctgaagggcgcgggcttctacgagtacgccgacggcaagcgatccgggttgtggcccggcttgcgcgagacgttcaa

SEQ ID NO: 448 - DNA, 401 bp, Mycobacterium tuberculosis H37Rv
acatgatcgaccgcatgctgttcgccgaggcgctggaaacccagaagtgcctcgacgagggggtgctgacgtcgacggccgacgccaacatcggctcgatcatgggcatcggcttcccgccgtggacaggtggcagtgcccagttcatcgtcggctactccggcccggccggtaccggtaaggcggctttcgtggcccgggcccgcgagctggcggccgcctacggcgaccgcttcctgccgccggagtcgctgctaagctgagcgcgagcagacgtaaaagcccccgcacgctcggcgtgtcgggggcttttacgtctgctcgcgcaacctaaattgccgggcccagcaggtcgtcggcgtcgcggatgatgtaaccgtagccctgctcagctaaaaacc

SEQ ID NO: 449 - DNA, 401 bp, Mycobacterium tuberculosis H37Rv
gtccgtcttcacggatcaacgtggcggtcagccccagccgccgtttggactgcaggtcagcggtcatccggaagaccggtgccggcaacaggtgcacctcgtcatagatgatgagcccccagtcgcggctgtcgaacagttccagatggcggtactcgcccttagtgcggcgggtgatcatctggtatgtcgagatggtgacaggtcggatttccttgcgttctcccgagaattcgccgatctcattctcggtgagcgaggtgcgcgcgaccagctctcgtttccattgccgggccgcgacgatattggtgaccaggatcaacgtcgtcgcgccggctttggccattgcggccgcaccgaccagcgtcttgccggccccacatggcagcaccaccaccccg

SEQ ID NO: 450 - DNA, 401 bp, Mycobacterium tuberculosis H37Rv
agtcaatggcgccgctcctcctcatcgctgcgctctgcatcgtcgccggcggtagtcaatggcgccgctcctcctcatcgctgcgctctgcatcgtcgccggcggtagtcaatggcgccgctcctcctcatcgctgcgctctgcatcgtcgccggcgcgggggtcatgggctccattatcggtcgtgggccgacaccaccaacgtgatgcggtggatggcgaagtcacgcagtcgcccggatgacgagtcgaacgccaccagctggccgccccgtagcgtgatcggtgcgaccacccgctgagtggcaacgccggcggcatcgaggtagctgatcaccaaggtggcctggtccttggccgcgcgctgcaacagcgacatggtgaccgccgggtcgacgcgg

SEQ ID NO: 451 - DNA, 401 bp, Mycobacterium tuberculosis H37Rv
ccagcgcggtcagtgtcatgtgggcacctgtgagttgaccccgacgatgtccttgcccagcggcaccagcgacaccgggatcagtttcaagttggccagtgctagcggaatgccgatgatcgtgactgccattgccgcggcactcaccaaatgcccgagggccagccagatcccgaacagcagcacccagatgacgttgccgatcaaggccccggtcccggcggttggcttttcgacgatcgtccggccgaacggccacaacgcgtacgacgcgatgcgcagcgccgcgaagccaaacggaatggtgatgatgagcaggaagcagacaagcgacgccagcaggtacccgagggccagccagaggccaccgaacaccaaccagataacgttcaggattagtc

SEQ ID NO: 452 - DNA, 401 bp, Mycobacterium tuberculosis H37Rv
acgccgccgaccgcgccggcccctccggcccccccggtcccgccgatgccgatcaacccggcgctgccgccggctccgccggcttggccgaccccgccggacccgccattgccgccgttgccatacaacaagccacccggcccgccggcctgcccggtacccggcgcaccattggtgccgttgccgatcagggggcgcccgagcagcgtctgcgtgggcgcgttgatcacattcaacgcttgctgcagcggggaggcatttgcggcctcggcgctaccatatgcgcccgcagccgtgctcaaggcctggataaaccgttcatgaaacgcggccgcctgcgtgccgagtgtctgataggcctgggcgtgcccggaaaacagcgacgccaccgctgccgacac

SEQ ID NO: 453 - DNA, 401 bp, Mycobacterium tuberculosis H37Rv
gcgcgcggtgagcgggcggtaccagtggagcagatggtgcgggacctgcggatcaaccggatcttcgaagggtccagtgagatcatgcggctgctcatcgcgcgtgaagcggtcgacgcgcacctcactgccgcgggtgatctggcgaaccctaaggccgatctgcggcagaaggccgcggcggcggccggcgccagcgggttctacgcgaagtggttgccgaagctggttttcggcgaaggccaactacccacgacgtaccgcgagttcggcgccctggcgacacatctgcgttttgtcgaacgctcgtcacgcaaattggcccgcaacaccttctacgggatggcgcgctggcaggccagcctggagaaaaagcaagggttcctcggccgcatcgtgga

SEQ ID NO: 454 - DNA, 401 bp, Mycobacterium tuberculosis H37Rv
ggtgaccgccaaccgggtgtccggccgaaacaaggtgctggtggtgttggcggggtcctggtatacctgcagcaaacgccacggcgcccgggaaatgacttcgggtaccgagagctgcacgggatagcgttcgcttaccggcaattcgccctgcgcctgcggggtctgacagtcgtcgaggtcgaccacgttgcagtacaaatagggccccacgcgggtcaggtgcccgtgcgagtaagcgctgatctcgggttgctgcggaccgtgtccgcgtactagcagccatgcaccggccccggccgccaccgagagcagaatcaccaggatcaccggcagcgttgcgacaccgcgcttcactgcggcgccaccgccgcaccacgacgggtggtttcttgctcggc

SEQ ID NO: 455 - DNA, 401 bp, Mycobacterium tuberculosis H37Rv
gcaccagcaagtacatccgagaacccatttcgcggctgcgcatggccgcggcgcgggtgacggtgatccgctcgcccgcccttgtagtccgtggcggtacgcggctgcgttcaggttcgggctgctcgcccagcggcgggagatagcggttggcactgggcatcggcggaggtcgacgcgatcggcgatagttggcgtcgtcgggagggtagttggccatgccagggtgcccgttgaccgatccgtttcgggtccggcggcccggggttggggccatccggcccggatgatcacctcgccgtccggacacaaatcaattctgtcctatccggactcctggcgtagccaaccgggtgtggcttgccggccgtgtcttccggcagtattggaagcgcgttaca

SEQ ID NO: 456 - DNA, 401 bp, Mycobacterium tuberculosis H37Rv
gaattcacttatggccgttgggattgcgacttggctacggtcactgaccgagactgcgtgtccatctcgatgctgaatgccttgggcttgcctgtccagccgggtttgtctgcgatcgacacgctcgtcggtgtcatcaatgatgctcgggtgctgctggtgttggaccattgtgagcatttgctggacgcgtgtgccgcaataattgattcgctgttacgttcctgtccgagattgacgatcctgacgacaagtaccgaagcgatcgggttggcgggcgagctgacctggcgggtgcccccgttgtcgctgaccaacgatgccatcgagctgtttgtcgaccgggcacgccgagtgcggtcggattttgcgattaatgccgataccgcggtgacggtcgg

SEQ ID NO: 457 - DNA, 401 bp, Mycobacterium tuberculosis H37Rv
aggcatttgtcgtcgtcgaaaacaacaggggccgagcgggataccggttgctgtattcggtgcgtcagtacgcgttggagaagctcagtgagtcgggagaggccgacgccgtgcttgcgcgttaccgcaagcacctcaaacaacccaaccaggtagtgcgtgctgggtcaggcggggttcggtactgatgcgtgaacgtagcttaaccgtcggtgggaattgaccgcgccacccatagcagtcgagaggaacacccgcagcaaagtgcgccaacaacaggaggctgacgtcgttgccctgggtcgaaagccagggctgctatgtgtgccggaaaggttccgtgcaatggatcttccgatggcagccgccgatgccttattcctatgggccgagacgccgac

SEQ ID NO: 458 - DNA, 401 bp, Mycobacterium tuberculosis H37Rv
actacttcatcgaacgcaagctttaccccaacgtcgacttctacaccggcctgatctaccgggccctcggcttcccgaccaggatgttcaccgtgttgtttgccctgggcaggcttcccggctggatcgcgcactggcgtgagatgcacgacgagggcgacagcaagatcggccggccccgccagatctacaccggctacacggagcgcgactacgtcaccatagacgcgcggtaggccggcgagcagacgcaaaagccccctaaaccggcaggtattaggggcttttgcgtctgctcgccaggcaagccagcactgccatcgcggcgttgtgaccgccgatgcccgacaccgccccgccgcgacgggcacccgagccgcacagcatgatccgctcgtggt

SEQ ID NO: 459 - DNA, 401 bp, Mycobacterium tuberculosis H37Rv
cctgggccgccgagatcgccaggctggcaccactggctatccagcacgccaagcgggtgctcaacgacgacggcgctatcgaggaagcgtggccggcccataaggaactcttcgacaaagcctggggcagccaggatgtcatcgaagcgcaggttgcccggatggaaaagcggccgccgaagttccaaggggcttaaccgtcatggtgcgccgagcgctacgactggcggccggcaccgcctcgctggccgccggcacgtggctgttgcgtgcgctgcacggcacgccggccgcgctcggtgccgacgcggcgtcgatcagggctgtgtcggagcaatcgccgaactatcgtgacggcgccttcgtcaacctggatcccgcgtcgatgttcaccctggatc

SEQ ID NO: 460 - DNA, 401 bp, Mycobacterium tuberculosis H37Rv
ggggtcggcgcccaccttcggtcgtggggtgttccgcaggatcgcattgttgagctcgactggaaccagagcgctcaggtcgatgagctcaccgtggtctgcgtgccggcacggcacttctcgggacggttcctgagccgcaacaccacactgtgggcctcgtgggcgtttgttgggccgaaccatcgcgcctacttcggcggtgataccggatacaccaagagcttcacccagatcggcgcggaccacggaccgttcgacctgaccctgctgcccatcggggcctacaacacggcgtggccggacatccacatgaaccccgaggaggcggtccgggcgcacctggacgtcaccgattcgggctcgggaatgctggtgccggtgcactggggcaccttccg

SEQ ID NO: 461 - DNA, 401 bp, Mycobacterium tuberculosis H37Rv
gcggaccacggaccgttcgacctgaccctgctgcccatcggggcctacaacacggcgtggccggacatccacatgaaccccgaggaggcggtccgggcgcacctggacgtcaccgattcgggctcgggaatgctggtgccggtgcactggggcaccttccggctggccccccatccgtggggcgagccggtcgagcggctgctcgcggcggctgaacccgagcacgtcacggtagccgtgccgctacccggtcagcgggtcgacccgaccgggcccatgagattgcacccatggtggcggctgtaattccccgcagcgcccggctaatggtgctagggggcgagccgaggcgatcaaaccaccgagtgttccggccgcgttggctactatctgcggccatg

SEQ ID NO: 462 - DNA, 401 bp, Mycobacterium tuberculosis H37Rv
tctggccaggcccaaccatgcggtcaaccacgtcaaggtcgcagaccgatgggaggcgcgctaccagcgcgatcccgacgcccaatcacctgcgggcggggtgagttcgtctcttaacgacatgacgcactggctggccatggtgctggccgacggcgtgtacaacggccgtcggatcacgtcgccggaggccctgctccccgtctacacgccgcaggtgatctctcgacacccggtgtcaccgagagcgcgggccagcttctatggctacggattcaacgtgggggtaacctcttcgggacgcaccgagtacagccattccggcgccttcgggctgggtgccgcggcgaatttcgtggtgctgccctccgaagacctggccatcatcgcgctgaccaacg

SEQ ID NO: 463 - DNA, 401 bp, Mycobacterium tuberculosis H37Rv
cgcaccgcgacaagtagggttcaccagaggatactggggccaagctcgtggcaagaaacggtacgcatgggaatcctggacaaggtaaagaacctgctgtcgcagaacgccgacaaggtcgagacggtgatcaacaaagcgggcgaattcgtcgacgagcagacgcaaggcaattattctgacgccatccacaagctgcatgacgcggccagcaacgtcgtcggcatgagcgaccagcagagctagcacgcatggcgaaactgtccggatccatcgacgtaccgctgccaccggaggaagcctggatgcacgcctccgatctgactcgttaccgagagtggctgaccatccacaaggtatggcgcagcaagttgcccgaagtgctcgagaagggcacggtc

SEQ ID NO: 464 - DNA, 401 bp, Mycobacterium tuberculosis H37Rv
cgttggtgaagtgcaacacgaacgttggatcggcttcgaaccagcgaatgtcgttgcctcggcgagcaacaaccgcaaaccgagatggaatctccggatagaagcgtggtaggtgcacgtcgcgctcgagcagcctgggatcccagaacagtggaaaatcgttgaggattacgtaattttcggtgaacgccatgtcatgcggtagccgcggcccgggcagcggaacatcgacatagtgcacaagctcattgttctggtcgacaacgccgtagcgcatatacggctcttgcttgctgtagttgaagaacaacagttcgccggtcttgttgtctaccttcggatgtgccgacacgccccagtcgaacggaaaccttccgtgccagctctccttgccgagcgta

SEQ ID NO: 465 - DNA, 401 bp, Mycobacterium tuberculosis H37Rv
ggagcttggcccctcgcgttggtccgcggcaggctcggtcggcaaatcctcaaatcggccccaagttgcaccgagcgggagcggcggtgacggccaacgtgtggtgtcgtgcgggcggcattcggatggcgccacggccggtcatcccggtggctacgcagcagcgcctgcggcggcaggcggatcgccagagcctgggtagtagcggcttgccagcgttgaattgtacgcctatcaggcacacaattgatgtcatggctaccaagcctgagcggaagaccgagcgtcttgcagcgcgcctgacccctgagcaggacgcgctgattcgtcgtgctgccgaggccgaggggactgacctcaccaatttcacggttacagcggcgttggcgcacgcgcgcgac

SEQ ID NO: 466 - DNA, 401 bp, Mycobacterium tuberculosis H37Rv
gctgcggtgtagatcggcttgaggtcgacgctgatcttgtcccagtacttgcgggaggcataccggaaagtgttgcggatcagatggatgatgcaggtctgcaccgtggccaacgggaacgccgcggacacgctgtcgggcaaccctttgaggccgtcgcagaccaggaagaagatgtctttgaccccacgattgcgcaggtcggtgagcactgccagccaaaatttggctgactcaccgtcgccttcgccggcccacatccccaggatgtccttgtggccgtcgaggtcgacgccgatcgcggcgtagaccggccggttgcggacctgcccgtcgcggatcttgaccatgatcgcgtcgatgaacaccgcggcgtagaccttctccagcggcctggacca

SEQ ID NO: 467 - DNA, 401 bp, Mycobacterium tuberculosis H37Rv
gcagcggcgggagtggtgctgtatgcgcgggtgtcaagccatgataggcgttcggatctggatcggcaggtcgcgcgtctaaccgcgtgggccaccgagcgtgacttgggggtggggcaagtggtgtgcgaggtcggttccggcctgaacggcaagcgacccaagctgcggcgcatcttgtcggaccccgatgcgagagtgatcgttgtggagcatcgggatcggctggcgcgtttcggggtggagcacctcgaggcggcgctgtctgctcagggccggcggattgtggtcgccgatcctggtgagacgaccgatgatctggtgtgtgacatgatcgaggtcttgaccggtatgtgcgcgcggctgtacgggcgtcgcggtgcgcgcaaccgggcgatgcg

SEQ ID NO: 468 - DNA, 401 bp, Mycobacterium tuberculosis H37Rv
ggcagctggatgtgccgcgcgagatgggcggcaagcgcgcggttgcggcccccggccaacagctgggtgctgcgcccgatgcggtcgtagccgtgcagcgacacggcgacgtcaacgtggtcaaggaattcggcgaggcgcgccgattccgcagggtcgaaccgggccgacggcaggtggtgcgggtagttgtccggatgacgcagcaggtacaccgaagcgcccgcagcctcggcggagcgttcggcgatcaggtcggtcacctgctccaggccgcccccgtggatggcgaggaagccgaagcgggaccgcagctggctcgtctcgatgacgccgggctggcttagcaactccgaaagtgattgtggcgcaggcccagatctcgatgacggtaacactgg

SEQ ID NO: 469 - DNA, 401 bp, Mycobacterium tuberculosis H37Rv
ctccagcgccgaggtcaggatggaacccggcgcgatcgcattgacccggacgcgtgggcacaggtccagcgccgccagccgggtgtagtgggccagtgcggccttggcggtgccgtaggcggcgaaaccccgcgccgccagccggcccatggtggagctgatgttgatcacgctgccgccgccggagtgttccagcatcaacggcaccgccgcgacggtcagcgcgtgggcggtgcccacgttgaaggcgaaggcgtccgcgaggtccttggtcgaggtgcttagcagcgtgttgggcatggtgccgccaacgttgttgacgacgatgtcgagcttcccgaaagctccgacggcctgaccagccagctgcgcggtcacctcgggatgggccagatcggcgg

SEQ ID NO: 470 - DNA, 401 bp, Mycobacterium tuberculosis H37Rv
cggtgttggcggcaggtcggtgccggagttgagggcttggatctgtggatcattccacacggtgatggtgccgttgaaaatcttggcggtagtgggtccgtcaagattcagcgtgctcacgcccttgatattgtaggtgatcgcgatcgggccgaacaccgtcggcaggtcccatgccggggaaccgcaccgctccgccgaccggtcaggttgaccggtcgacggattcaacgggacatccgagccggcgaaatcggtttcgttgttgagaaactgggtcaccccggcaccggacccgttggcgttgtagtccaacgtgtagcccgggcacgatcgcacgtaggcatagacgaactgctccatggcattttcttgtgcggtcgagccgctggagtggagct

SEQ ID NO: 471 - DNA, 401 bp, Mycobacterium tuberculosis H37Rv
ggctggcttcgcatcgaaaaccccggcgaaccaggcgatttcgatgatcgacgggcccgccccggacggctacccgatcatcaactacgagtacgccatcgtcaacaaccggcaaaaggacgccgccaccgcgcagaccttgcaggcatttctgcactgggcgatcaccgacggcaacaaggcctcgttcctcgaccaggttcatttccagccgctgccgcccgcggtggtgaagttgtctgacgcgttgatcgcgacgatttccagctagcctcgttgaccaccacgcgacagcaacctccgtcgggccatcgggctgctttgcggagcatgctggcccgtgccggtgaagtcggccgcgctggcccggccatccggtggttgggtgggataggtgcggt

SEQ ID NO: 472 - DNA, 401 bp, Mycobacterium tuberculosis H37Rv
ctgcggtcccgcagcgggcgcgatgtcaccgccgagtatccgcaattgcgggcattggcggaggatctcgccgatcaccacgtggtgctggacggcgaggccgtcgtacttgactcctctggtgtgcccagcttcagccagatgcagaatcggggccgcgacacccgtgtcgagttctgggcgttcgacctgctctacctcgacggccgcgcgctgctaggcacccgctaccaagaccggcgtaagctgctcgaaaccctagctaacgcaaccagtctcaccgttcccgagctgctgcccggtgacggcgcccaagcgtttgcgtgctcgcgcaagcacggctgggagggcgtgatcgccaagaggcgtgactcgcgctatcagccgggccggcgctgcgc

SEQ ID NO: 473 - DNA, 401 bp, Mycobacterium tuberculosis H37Rv
gcgaagatctcgccgttcgccacggccggcaagttatccggcgcacagctcacctgcctgcatgaggcgatggcgtcggtgctgtcggacgcggtgcgccggtccgtcggccagggcgcggccatgctcaaaggggagaaacgttctgggcttcgagtacatgcgcgcaccgggttaccctgcccagtgtgcggtgacaccgtgcgggaggtgtccttcgcggacaagtcttttcagtactgtccaacgtgtcagaccggtggcaaggcgctggccgaccggcgtatgtcgcggctgctcaagtagtcgatatgctcaccggagtgactcgccagaagatcctgatcaccggcgccagttccggcctgggcgccgggatggcccgatccttcgccgcccag

SEQ ID NO: 474 - DNA, 401 bp, Mycobacterium tuberculosis H37Rv
ccatcgaaaccaacctggtcgccgcactcgtgcagatcgaaacggcactggacatgttcaaccagcgcggttcggggcatttggtgctcatctcctcagtgctcggcgtcaaaggggtgccgggcgtcaaagccgcgtatgcggcaagcaaagccggtgtgcgctcgctaggcgaatcgctgcgcgccgagtacgcccaacgccccatcagggtcacggtgctggagccgggttatatcgagtcggagatgacggccaaatcggcgagcacaatgttgatggtggacaacgcaactggcgtcaaggcgctggtggccgccatcgagcgcgagcccggacgcgccgcggtcccctggtggccatgggcgccactggtgcggctgatgtgggtgctgccgccg

SEQ ID NO: 475 - DNA, 401 bp, Mycobacterium tuberculosis H37Rv
gcggacgcctgaccacaagatcctcgcgctggatgccaagatcaccctcgacggcaacgccgatttccgtcagcctggccatgccgagttcgaggatcgagctgccaccgatccactggagttgaaggccaaggagcacgacctcaactacgtcaagctggacggtcaggtggggatcatcggcaatggcgcgggcttggtgatgtcgactctcgacgtcgtcgcgtatgccggtgagaagcacggcggagtcaagccggccaacttcctggatatcggcggcggcgcttcggccgaggtgatggccgcgggtctggacgtggtgctgggcgaccagcaggtcaagagcgtgttcgtcaacgtcttcggtggcatcacctcgtgcgatgcggtggcgaccg

SEQ ID NO: 476 - DNA, 401 bp, Mycobacterium tuberculosis H37Rv
cagtcccggtcagtcgctggccggtatcacgccggccaacatcaccggacccggtccaattggtctggtgtccaagtcggggacgttgacctaccagatgatgttcgaactgcgcgaccttggattctccacggcgatcggcatcggtggtgatccggtgattggcactacccacatcgacgccatcgaggccttcgagagggatccggacaccaagctcatcgtgatgatcggcgagatcggtggtgacgccgaggagcgggccgcagacttcatcaagaccaacgtgtccaagccggtcgtcggctatgtcgccggatttaccgcacccgaaggcaagacgatgggccacgccggcgccatcgtctccggctcgtctggcacagcggcggccaagcaag

SEQ ID NO: 477 - DNA, 401 bp, Mycobacterium tuberculosis H37Rv
gcgcgcggtcgatcgcggcctgaacaccgtcctgatcgctgtgggatcccagcgctcaatgtcagctaacgtcaacgccgtcgcatcgggcgcttccaccgcctgttggataaaccgcggccagtgccgcggcgttgtgttcctccatctcggcgaacccgaccgcggccagatgcatgccgtaagaatggtccccgatgcgggccgcgtgggcggtgctggcctccgcccagctatccagcaatcccgacagcgcgcccgccgacgaaccgacccatcccggccgcgccccttcggccgcacccaggcagcagtggtgtgacgtcagcaaagactcgccgtggtcagcctgctgataaccgacctgggacaggacttcaggaatcgcccgcaacgttctg

SEQ ID NO: 478 - DNA, 401 bp, Mycobacterium tuberculosis H37Rv
cctgggacaggacttcaggaatcgcccgcaacgttctgccataccaactcgcttccacacgaaccaaactttcggcggagtatggcacacgagcacattgcgggcgattcacccgcatcgagctgaccgggcggcgcaccttgctatttgcggctatttgcgtggcttgcggggtttgcgcttgatgcccacatcaccccacagcgagaagccgcggatcctcaccgtcggcacgccacgggtgccctccccgaccaccttgcggtcgaagccgcccatcactcggtgaccgtggatctccacgttgacttcgggtggcagcagaattgtctgcgcccccatgatcgagtacgcacggatgtccacctcggtcgaggtgaagtcggcgtagcgcagatcca

SEQ ID NO: 479 - DNA, 401 bp, Mycobacterium tuberculosis H37Rv
cgtgtgcgttgggcctggctacccccacggccatcatggtcggcaccggccggggcgccgaactggggatcctggtcaagggaggcgaggtgctggaagcgtcgaagaagatcgacaccgtggtgttcgacaagaccggcaccctcacccgcgcccggatgcgggtgaccgatgtgattgccggccagcggcgccagcctgatcaggtgctgcggctcgccgccgcggtcgaatcgggctccgaacaccccatcggtgcggcgatcgttgccgctgcacacgagcgcgggttggcgataccggccgccaatgcgttcaccgccgtcgccgggcacggggtgcgggcgcaggtcaacggcgggccggtggtggtcggacggcgcaagctcgtcgacgaacaa

SEQ ID NO: 480 - DNA, 401 bp, Mycobacterium tuberculosis H37Rv
ttctgggtcatcagcttggcgagttcgacctcaatgtggcactgcgccaacggatgtgccaggccctggtgcgcgccgatcggggtggaccacaccttgcgggttttgacgtagtcgacggccctgccgagtgcgaaccggcccatgcccaccgcgctagccgcacccatgatgcgctcggggttcaggcccgcgaaaagctgtgcgatcgccgcgtcttcggctccaaccagcgcatcggcgggtagccggacgtcgtcgaggaaaacctggaactggcgttcggggctgaccagctccatctcgatcggggtgtagctgaacccgggagcgtcggtgggcaccacgaacaacgcggggcgtagcttgccggttttggcttcctcgctgcggcccacgac

SEQ ID NO: 481 - DNA, 401 bp, Mycobacterium tuberculosis H37Rv
ggtgttcatctccaggaagtagaactcaccttcccggccaggtgagtcatcggcgaggaactccaccgtgcctgccccggtgtagccgatcgcgctggccgccagccgggccgcgtcgaacagcttggcccgcatccccggtacgcgttccaccagcggcgacggtgcctcttcgatgatcttctggtggcggcgctgaatcgagcattcccgttccccgaccgcccacacggtgccatgggtgtcggccatgacttgcacttcgacgtggtgcccggtgggcaggtagcgctcgcagaatacggtcgggtcgccgaacgcggattgggcttcacgtcgcgcggcttcgacttcggccggcagggccgataattcgtgaaccactcgcatgccgcgaccgc

SEQ ID NO: 482 - DNA, 401 bp, Mycobacterium tuberculosis H37Rv
gcttggaccgttgccgtcggtgatggagccggtgacggtgttggtgaccgggtcgatcaccgacaccgtgttgctgccctggttggtgacgtagatgttgccgcccgggttgaccgccaccccgtgcggatcgttgaagctggcgtgggtgatggtggtgacggcgccggcggccccaccggcaccgccgaccccacccgcaccgccgataccgccggccgggccgccgccggcaccgccggcggtgccggcgcgggcgaggctgaccgcgccgccggtgccgccggtcccgccgtccccgccgtgtccacccacaccgattaacccgccgtgaccaccaaccccgccggtgccaccgtcaccgccggccacaccgaaggttgtgccggctccgccggccc

SEQ ID NO: 483 - DNA, 401 bp, Mycobacterium tuberculosis H37Rv
acggtgttggtgaccgggtcgatcaccgacaccgtgttgctgccctggttggtgacgtagatgttgccgcccgggttgaccgccaccccgtgcggatcgttgaagctggcgtgggtgatggtggtgacggcgccggcggccccaccggcaccgccgaccccacccgcaccgccgataccgccggccgggccgccgccggcaccgccggcggtgccggcgcgggcgaggctgaccgcgccgccggtgccgccggtcccgccgtccccgccgtgtccacccacaccgattaacccgccgtgaccaccaaccccgccggtgccaccgtcaccgccggccacaccgaaggttgtgccggctccgccggccccgccgacaccaccggccccgccgttgccgaacag

SEQ ID NO: 484 - DNA, 401 bp, Mycobacterium tuberculosis H37Rv
gactgaacgggtgcgttgatcgcatcgagcacgttctgcagcggtgttgcgctggccgcttcggcgaccgcgtaggtgctgctagcttggcttaaggccagcacgaaccgttcctggtaggccgcgacctgcgcgctgatcgcttgatagtgctggccgtggctgccgaacagcgccgcgatcgccgttgacacctcgtcgtgggcggcggccaacacctgggtggtcgccgccgccgcggtgttggcggtgttgatcgccgagccgatccgcgccgcatcggccgcggctgtggacactaactgtggggccacgttgacaaacgacatcgaaatcctcctgaccgcgacgatgttgagatgcgggcggcccaccgcctgttacccctgcggtgggtaacc

SEQ ID NO: 485 - DNA, 401 bp, Mycobacterium tuberculosis H37Rv
tgcgaattcttgtcgttgacgacgatcgtgcggtgcgcgagtcgctgcgccggtcgctttccttcaatggctattcggtcgaactggcccacgacggggttgaggcgctcgacatgattgccagcgatcgccccgacgcgttggtcctggatgtcatgatgccgcggctggacggcctcgaggtgtgccgtcagctccgcggcaccggcgacgacctgccgattctggtgctgaccgcgcgcgactcggtgtccgagcgggtggccgggctggacgccggtgccgacgactacctaccaaagccgttcgccctcgaagagctgctggcacggatgcgggcgctgctgcgccgcaccaagcccgaggatgccgccgagtcgatggccatgaggttctccgac

SEQ ID NO: 486 - DNA, 401 bp, Mycobacterium tuberculosis H37Rv
ggctccgcggctacccaagcaggagatggtcgacctgcgtgccgatgtgctggctcaaatcgaggaattgtccacactggtaggcgatttggtggacctgtcccgaggcgacgccggagaagtggtgcacgagccggtcgacatggctgacgtcgtcgaccgcagcctggagcgggtcaggcggcggcgcaacgatatccttttcgacgtcgaggtgattgggtggcaggtttatggcgataccgctggattgtcgcggatggcgcttaacctgatggacaacgccgcgaagtggagcccgccgggcggccacgtgggtgtcaggctgagccagctcgacgcgtcgcacgctgagctggtggtttccgaccgcggcccgggcattcccgtgcaggagcgcc

SEQ ID NO: 487 - DNA, 401 bp, Mycobacterium tuberculosis H37Rv
tggcgcataatcccatgctggtgttagccgatgagccgaccggcaacctggactccgataccggggataaagtcttggatgttctgcttgatctcacccgccaagcaggtaaaaccttaatcatggctacgcatagcccgtcgatgacgcagcatgccgaccgggtagtcaacttacagggcggcaggttgatacctgccgtgaaccgagaaaatcaaaccgaccagccggccagcacgatcctattgcccacgtcatatgaatgaccaagctcccgttgcttatgcaccactatggcgcacggcgtggcgtcggctgcgtcagcggccgtttcaatatattctgctggtcctgggaattgcgctaggcgttgccatgatcgtggctatcgatgtatccag

SEQ ID NO: 488 - DNA, 401 bp, Mycobacterium tuberculosis H37Rv
attgccttgttggtgggtatctttttaatctacaataccgtgacatttaatgtcgtgcaacggcgaccgtttttcgccatattgcgctgtttgggtgtaacccgagagcagttattttggctgataatgacggaatccctcgttgccgggctgattggtacgggcttgggcctcttgattggaatttggctcggcgaaggcttgatcggcctggtgactcaaaccatcaatgatttctattttgtcatcaatgttcgcaatgtgtccgtctccgccgaaagcttgttgaaggggctgatcatcggcatctttgccgccatgttagccacactgccaccggctatagaagcgatgcgcaccgtccctgccagcacattgcggcgctcctccctggaaagcaa

SEQ ID NO: 489 - DNA, 401 bp, Mycobacterium tuberculosis H37Rv
cgccgaaagcttgttgaaggggctgatcatcggcatctttgccgccatgttagccacactgccaccggctatagaagcgatgcgcaccgtccctgccagcacattgcggcgctcctccctggaaagcaagataaccaagctcatgccgtggttgtgggtggcgtggtttggtttgggtagctttggtgtattgatgctgtggttgccgggcaacaacctggttgtggcctttgtcggtctctttagtgtgctgattgccctggcgcttattgccccgccgctgacccggtttgtaatgttgcgcttagctcctggcttaggacggctgctcggtccaataggtcgaatggcgccacgcaatattgtgcgctcgttgagtcgcacctctatcgccatcgccg

SEQ ID NO: 490 - DNA, 401 bp, Mycobacterium tuberculosis H37Rv
acacctcagatcaaggtgtgattttgatggatcgcgccagttatcgggcccattggcaggatgatgacgtgacgaccatgtttctttttttggcatcgggtgcgaatagcggtgccttgatagatcaactacaagccgcgttcgcgggtcgggaagacattgttattcaatcgactcatagtgtccgcgaagcatcaatgttcatatttgatcgtagttttaccattaccatcgcgttgcaactggtggccacggtggtggcttttattggcgtactgagcgcgctgatgagtttggaattggaccgggctcatgagttgggtgtttttcgcgccattggcatgactacccgccaattatggaagctgatgttcattgagaccggcctaatgggcgggatg

SEQ ID NO: 491 - DNA, 401 bp, Mycobacterium tuberculosis H37Rv
ggcctaatgggcgggatggccggcttgatggccttgccaactggttgtattctagcgtggattcttgtccgcattatcaatgtccgctcattcggctggaccttgcagatgcactttgagtcggcgcattttcttcgagccctgttggtagcggtggtggccgccctggcggcgggtatgtaccccgcttggcgtttgggacggatgacgattcgcacggcgattcgtgaggaatgacggtacatgagaaaagcaggattgaccggtgttgtactggttctgacgctgacgctggtggctttctggtggtggcaacgtccgcgaacgaatgctgtggctgctgactctttagttggcgttttggtcgatgagaataacgccggatattccttggccacagt

SEQ ID NO: 492 - DNA, 401 bp, Mycobacterium tuberculosis H37Rv
ttcgcacggcgattcgtgaggaatgacggtacatgagaaaagcaggattgaccggtgttgtactggttctgacgctgacgctggtggctttctggtggtggcaacgtccgcgaacgaatgctgtggctgctgactctttagttggcgttttggtcgatgagaataacgccggatattccttggccacagtgccgggagccgttcggtttccccgggatttgggtcctcattacgattaccagacggaatggtggtattacaccggtaatctggaaactgctgacggtcggcttttcggctaccagcttacttttttccgcagggctctcgcaccacccggcgagggggtcgccatagcggatgcttcttcatggcgcacgacccaggtctatatggcccac

SEQ ID NO: 493 - DNA, 401 bp, Mycobacterium tuberculosis H37Rv
attaccagacggaatggtggtattacaccggtaatctggaaactgctgacggtcggcttttcggctaccagcttacttttttccgcagggctctcgcaccacccggcgagggggtcgccatagcggatgcttcttcatggcgcacgacccaggtctatatggcccacttcgcgataagtgatatttcgaacaggggcttttatccggctgagaaattcagtcggcaggcgttgggtttggctggtgctagctcggagccgtatgcggtgtggctagacgattggtatgcgcgtgaatccaacaacaattcggtgcaattgtttgctcgaactcagaacacggtgttggatttgacattgacgcaaacgctgccgcctatcttgcaaggaaatgctgggtta

SEQ ID NO: 494 - DNA, 401 bp, Mycobacterium tuberculosis H37Rv
caaccggctgcccagtaaacgcacgtcggtgagcacctcgccacggcgtgtcgggctggccagcgtcgaacccaccactgcgtccaggtcagcttgcgacccgtcgggaagcgtggtggccgaacgtttttccagcctgacatcaccgggagtcaatgcggtaccggggcgcagatcgtgcgcggccaccaccacctcggagcgatcatcctctggattggaccgcagcgccgcaacgccggccagcatgaccagcccggccgcggcgaagcgccgggcccgcacggtccgggtccagtccgggcgcaaaaacgccgatatccggctgaccaggctcggattcagggaggattccgccacaccgcaaacggtaggcgcagcgccgtgctaggcagcgccgg

SEQ ID NO: 495 - DNA, 401 bp, Mycobacterium tuberculosis H37Rv
cccgcgcggcgcagcaacacatccaacatctcgattgaccccggctcgccgcctaccggcacatacgcgcagacggtgctgtcgctggtgaccatgcgctccaggtgtccacgcaacatccgggcctcggcggcgcgcacgtcgtcggcaacgcggcgtcgggccgccaggagctggtcgcgcaacgccgacttgctcgccatcgccatgtcctcaacgatgacacagccccggccgtcccgcgcgagcgccgggacagcgccaacgaagaggcgggcaatcagcacgctgcgggttatcgtgtgaacgatgtcacgcccagaagtactaacgccgttcacggcaatcgtcccggcagccggcctgggtacgcgctttctgccggccaccaagacggtgcc

SEQ ID NO: 496 - DNA, 401 bp, Mycobacterium tuberculosis H37Rv
tgcgcgcggggacgatcatcggcgcagcccaggtggggttgctggcggcggtcggccgtgaacgggtgctggtgcaccctcgtccgcggctgtcggtgatggccgtcgggggcgagttggtcgacatctcgcggaccccgggcaacgggcaggtttatgacgtcaactcctatgccttggctgcggcgggccgggatgcctgtgcggaggtgaaccgggttggcatcgtcagcaacgaccctacggaacttggcgaaatcgtcgagggccagctcaatcgggctgaggtcgtggtgatcgccggcggggtgggcggtgcggcggcagaagcggtcaggtcggtgctttccgagctcggtgagatggaggtcgtgcgggtcgccatgcatccgggatccgtg

SEQ ID NO: 497 - DNA, 401 bp, Mycobacterium tuberculosis H37Rv
gatcagcaaacgtgatgccgttcggcgcaccagcgatgtggctttggcgactcgggtactcaacggtggcgctggtgcgcgcctgctcaagcgaggtggtcccgccgcgggacatcgctgggggtacctcccgcccgaagggcagggggacgacccggactggaagccggaggaagactggcgcgacgacccggtcgaggacgggttcgccgacgtcgagcatgacatcgacgaggaccaggaggccgacgatgcgcgccgtcggggtgcggttgtcatgaaggttgccgctccgcagaccgcaggtgccgacgagccggactacttagacgtcgatgtggtcgaagaagactcggaggcgcttccggtgggggctggcgctgcggtcggcgagtccgccg

SEQ ID NO: 498 - DNA, 401 bp, Mycobacterium tuberculosis H37Rv
gtgcgttgatcgtgatggcggtgatcctggttggctctgccgccgcggccttcgagctgaccccggtcgcgtggtggatctgtggtagcgccaccggtgtgacggtgctctacctggcatatttgcgtcggcaaacccgcatcgaggagaaggtgcgtcggcggcggatgcagcggatcgcgcgggcgcggctcggtgtagagaacacccgtgaccgcgagtacgatgtggtgccgtcgcggctgcgccgtccgggcgcggtggtcctggagatcgacgacgaggacccgatcttcacgcacctggagagcgcggccccgatacggaactacggctggcccagggacctgccccgggcggtgggtcagtagggcgcgcagttcggccatcggcgccgctgc

SEQ ID NO: 499 - DNA, 401 bp, Mycobacterium tuberculosis H37Rv
ccgttcgcgaacctgatcgcggtcgacgatgagcgcgccgaacgccgcgacgacgaagaacgtcaggaagccgtccagcagcgcggtccgcgcggtgacgaagctgaccccgtcgcagatcagcagcaccccggcgatggcgccgaccaatgtcgaccggctgatccgccgcacgatccgcaccaccagcgccaccaggaccacacccagcagggcgccggtgaaccgccagccgaatccgttgtaaccgaagatggcctccccgatcgcgatcagctgcttaccgaccggcgggtgaaccaccaggccgtacccggggttgtcttccaccccatggttgttcagcacctgccaggcctggggtgcgtaatgcttctcgtcgaagatgggggtgccggcat

SEQ ID NO: 500 - DNA, 401 bp, Mycobacterium tuberculosis H37Rv
attcgccggtcagcgccgccggtggtggcaagtcgagtcgactggtggcgcggccgaccgcccgcagcaccgcaggcgctccgccaagatcgccgagtcggtcgattcgcaccgttctagcttgacagaactgtggattttcgcagcgcaagtggctgcgtggggatttcgtccgcgtgctaagctcccacgctaagttcaatccgtgaccggctccggtctccgtcccggggggtgttgctgtgcgagcagccaatgccaatgccgtttctcgctgaccgcgagacgttgacgctcggtgtgatcttgaagtagcgatggttttaagaagtaggaaaagcacgctcggcgttgtcgtgtgcttagcgctggtgctcggtgggccgctcaacggttgcagc

SEQ ID NO: 501 - DNA, 401 bp, Mycobacterium tuberculosis H37Rv
cgctaagttcaatccgtgaccggctccggtctccgtcccggggggtgttgctgtgcgagcagccaatgccaatgccgtttctcgctgaccgcgagacgttgacgctcggtgtgatcttgaagtagcgatggttttaagaagtaggaaaagcacgctcggcgttgtcgtgtgcttagcgctggtgctcggtgggccgctcaacggttgcagcagcagcgcgagccaccgcggtccactgaacgcaatgggaagtccggccataccgtcgacggcgcaggagatacccaacccgttgcgcggtcagtacgaagacctcatggaaccgctgtttccgcaggggaaccccgcgcagcaacgctatccgccttggcccgcgtcctacgacgcgagtttgcgagtct

SEQ ID NO: 502 - DNA, 401 bp, Mycobacterium tuberculosis H37Rv
cgctgccggcagcggtggacctgaagacgctggtctccgaccagcgcggcgatcgcagcagcgaccagccgacaccggcgtcggtcgccgagacggttcgcgttgatctgtccggcttgcccgcgggccactacacgctgcgggccgcgatcgactggcaacagcacaaaccgaacggctcccatgtggtgaactatccgcccatgctgttgtcccgcgacggccgcgacgattccgggttttatcccgtcgccacgctcgacatcccacgcgacgcgcagaccgcggtcaacgcttcgtaggtggctttcccgtcgctgcggtccgctcacttgccttcgggtggttgcggcggctggtagcggggaaataccccggtgggcggcggcagcgctgtgccg

SEQ ID NO: 503 - DNA, 401 bp, Mycobacterium tuberculosis H37Rv
cccggagatgaacatgagccgggaggtcgtcgaagacccgggggttccggggacccaggatgtgacgttcgcggtagctgaggtcaacggcgtcgagaccggccgtttgcccgtcgccaacgtcgtggtgaccccggcccacgaagccgtggtgcgggtgggcaccaagcccggtaccgaggtgcccccggtgatcgacggaagcatctgggacgcgatcgccggctgtgaggccggtggcaactgggcgatcaacaccggcaacgggtattacggtggtgtgcagtttgaccagggcacctgggaggccaacggcgggctgcggtatgcaccccgcgctgacctcgccacccgcgaagagcagatcgccgttgccgaggtgacccgactgcgtcaaggtt

SEQ ID NO: 504 - DNA, 401 bp, Mycobacterium tuberculosis H37Rv
ctgtgaggccggtggcaactgggcgatcaacaccggcaacgggtattacggtggtgtgcagtttgaccagggcacctgggaggccaacggcgggctgcggtatgcaccccgcgctgacctcgccacccgcgaagagcagatcgccgttgccgaggtgacccgactgcgtcaaggttggggcgcctggccggtatgtgctgcacgagcgggtgcgcgctgaccatccggctgctcgggcgcactgagatcaggcggctggccaaagagctcgactttcggccgcgcaaatctctcggacagaacttcgtgcacgacgccaacacggtgcgacgggtggttgccgcctccggggtcagccgttccgacctggttttggaggtcgggccgggcctgggatcgct

SEQ ID NO: 505 - DNA, 401 bp, Mycobacterium tuberculosis H37Rv
accgaagtgtgaccgaattcttgggagcatgcctcgggcggccaggggtatccgcgcgtgccgaggccggtgggtcgatcggctggcgcaccagcatgccagcggtagggccgcaggcatccgccctcgcgaggtcggtggcgcgcatcaaagccaggcgcaaaagccataccatgatgcgacagagccgctcggcgagagcctccgctaccggccagctcacggcgatagctgcatcaacggccatcgagacaacccgtcggcacgggaatcctcgcagttcaccgcggggagtacggcaaaggctgtgaccaagctgtgacatcgccctcaaacctcggcagagtttggcagctacttaagagttgcttaagataatccgcggtgttgggtcgtgggct

SEQ ID NO: 506 - DNA, 401 bp, Mycobacterium tuberculosis H37Rv
gtcggtcagggtggtgtcgggaccgacgacacagcgaccgccgatctgggtgcggcccagcaactgggtacccgggtgaatgacggtgtcgcggccgatggtgacgtcgacgtcgatccaggtggtagccgggtcgacgacggtgacgccggccagctggtgagcggccaccacccgccggttgagttcggaggccagctcggccagctggacgcgattgttgacgccggccaccaacgcgctgtcgtcgacgtggctggcatgtacggtctggccgtcggagcgcaagatggcgatgacgtcggtgaggtagagctcctgttgggcgttgttggagctcagccggctcagtgcggaccgcagcgcggcgatgtcgaaggcgtagacgccggcgttgactt

SEQ ID NO: 507 - DNA, 401 bp, Mycobacterium tuberculosis H37Rv
tggcatgtacggtctggccgtcggagcgcaagatggcgatgacgtcggtgaggtagagctcctgttgggcgttgttggagctcagccggctcagtgcggaccgcagcgcggcgatgtcgaaggcgtagacgccggcgttgacttcgcggatttcccgctgcgatggtgtcgcgtcggtttgctccacgatcgccatgacttcgtgatcctgggtgcgcaggatgcggccgtagccgaagggatcatccagcgtcgtggtcagcaccgtcaccgcagccgacaccgcgcggtgggtggcgatcaagtcggccagcgtgtcggcgtccagcagcggggtatctcccgaggtgaccacgacgttgccggcgtagtcatcgggcagcgcggacagcccgcagagt

SEQ ID NO: 508 - DNA, 401 bp, Mycobacterium tuberculosis H37Rv
aaccgaagaaggaagtggtggccgcgcacctggtcaacctggtctggaatggcctgacccacctggaggccgatccgcggctacaggacgagtagcgggcggggaagccgggcccaatgttgactaacctcggcgccctagaatggccgcatcatgaccgcaccggggcctgcctgctcagataccccgatcgcggggctcgtcgaattggcgctgagcgcgccgacattccaacagctcatgcagcgcgccgggggtcgacccgacgaattgacgctcatcgcgccggccagcgcgcggctgttggtcgccagtgcgctggctcggcaggggccattgctggtggtcaccgccaccgggcgggaagccgacgacctggccgccgaactgcgtggtgtgtt

SEQ ID NO: 509 - DNA, 401 bp, Mycobacterium tuberculosis H37Rv
gtaaaggcatgcgataaccgccccgagtgcgacggggtagtcaacaaacccatgggacgatgatcgtgacggaagccggtataggtgccctacgagggagagttgtgtcgccgagacgctggttgcgggcggtcgccgtgataggggcgaccgcgatgctgttggcgtcgagctgcacttggcagctgagccttttcatcaccgacggcgtgccgcctccgcccggcgatccggtgccgccggtggatacgcacgccggcggccggcccgcggatcagttgcgcgaatgggcggagaaacgtgctgcggcattgggaattccggtcatcgcgctggaggcctacgcctacgccgctcgcgtcgccgaggtcgagaatcccaagtgtcatcttgcgtggacc

SEQ ID NO: 510 - DNA, 401 bp, Mycobacterium tuberculosis H37Rv
tgagggcctacaacaactccgttatctatgcgcgggcggtccgggactgggcgaccgcgtatgcggcgggtcatccgctgtagcaggatgaaccgctaacccaggctttacgctaacagcggtcggggccagccaacccaagaccgtccgtgcagcagctacgacgcaaggagaacccagtgccgattatcgagcaggttagggcccgagagatcctcgattcccgcggcaacccgacggtggaggtcgaggtggcgcttatcgacgggacattcgcccgggccgcggtgccgtcgggcgcctcgaccggggagcacgaggccgtcgagttgcgcgacggcggcgatcgctacggcggcaaaggcgtgcaaaaagccgtgcaggctgttcttgatgagatc

SEQ ID NO: 511 - DNA, 401 bp, Mycobacterium tuberculosis H37Rv
cccgcatgggaatgttcggccatgaccagacaactgcatggaattgagcttcgatacgtgctcaccctgcacctggccgtccatggaccggcggccattaccgaaatgatctaaggcctgggctggcacggctttggagtccggggcagggcatccaaggtggtgtcggaggcactgcgctgggaaatcggacggggccgagtataccggctcgggcgcggacgctacgggccggggtacatcccgcgctccaccgaataccggattcaccaacgcgtgttggcgttgcgggcatccgccaacgtgtcgctgcgaggcgggcaaagtgtacatccgctcccagcggaaacgcctgtggcagatgtgatttaggcttcgaagcggtagcccatccctgattc

SEQ ID NO: 512 - DNA, 401 bp, Mycobacterium tuberculosis H37Rv
acccgacatgtccggcaggccgaggtcgaggatcaccacatcgggcggatgctcagcggcggcgcgcagcgcacccgcacccgtcgaggcggtgatgacctggtagccacgcacggtcaggttgatacgcagcgcgcgcaggatctggggttcgtcgtcaatcaccaagacgagggtcatgggcggtcctcgggagccgccagatcgatcaccactgtgagcccgccgcccggggtatcggtagccgaaatcgtgccgcccatagcctcgacgaagccgcgtgccaccgacatccccagaccgacaccggtggtgttgtcgtgatcccccggccgctggaacggggcaaagagttgctcctcggtcccgcgcgggacccctgggccctcgtcgatgacatt

SEQ ID NO: 513 - DNA, 401 bp, Mycobacterium tuberculosis H37Rv
cgccgatcccctcgtcaaacaggcgtgcccatcgcgatcgccgcgatgtgccgacgacgagctgcgtggcgttcatctcgcgggcgaagtccagcagcgcggtgggcacgtcgtcgccgaccacggtgtgcatggtcgcaccgaggcttgtcgccagctcgcggaccctgcccagctgcggcgcggacacccccgccaggccgtcgccacggataacgtgaaccaccatcagctcggcgctggacttcgacgcgatccgcgatgcccgtcgcaccaacgtctccgactccgggccgccggtcacggcgacgacgacgcgttcccgcgcctcccacgtggcggtgatctttttgtctgcgcggtacttctccagggccgcatcaacttggtcggccagccac

SEQ ID NO: 514 - DNA, 401 bp, Mycobacterium tuberculosis H37Rv
cgaccacgtcggtgccgcgctccagcctgcggtgcgcctcgccgagcatggcgtaggttttgcccacgccgggggccgcgcccagatagatccgcagctgcccgcgcttggtggtcacatgctcaatcatccaccggtagggcgtaaagatcgcgcaaagatcggcgaagagcaacgtcacggtcgtgttcctggggggcccggcaactaccatcctgctgggctatctgatgcgctgcgatgccggtgcacaagaatcgagaggactcacatggccgacttggtgttggtgctgaccgtgatggcctttgccgggctttgcctgctctacgtccgtggctgtgaacggatcattcgccgcgacgaaatcggggaaacaacagtcgaactcacgcgagcgc

SEQ ID NO: 515 - DNA, 401 bp, Mycobacterium tuberculosis H37Rv
tgtcggtttgtgccatgttgttgccggcagcctgcaccttctgcccgtgggcgttggcctgctcgtagatcacctggaagttacggcccagctgggtaatgaacccctggcaggccgccgaaccggcgccgccccaaaagtcactcgcggtcaacacatcagaaatgatggcctgatgctcggcctccagcgacccggcctgagcgcggatcatggcgccgtgagcgtcgacgtccccgaattgatagttgatggtcatgtgtcctcctgagtcgtcgggccgggtcagctgctgaggatctgctgggaggcctgctcttgctgttcgtagttgttggcgtcgcgaaccagcccgtcacgcaccccgtgcagcatgttcacgatgttgcgaaacgcctgat

SEQ ID NO: 516 - DNA, 401 bp, Mycobacterium tuberculosis H37Rv
atccttaacaaggtcttggcggctgacatggcggtgtgatctggtgcccgggctagcacacttcggcacacaaatgagacgcgcggcgcgcggattctaggcgaatgacggctctttcgcacctggcgtgtcgcggtagggttggtgcactggatcgggtccaagcgctacattcgccgtcaagcctccacagcccgattggcagaggcagcggacaatccgcgctcacgggtgctggcgtttgctagtgccggtaatcttcgaaagagtcgcttctaactgccaatatgccgggtcgaagccactgtccagcactgtcggcatccagatgggggcgttggcgcgctgatcgatacgccgtctgcgcggctcccggcacaatgagttcgtgcccgattcct

SEQ ID NO: 517 - DNA, 401 bp, Mycobacterium tuberculosis H37Rv
gagcgcgatcgtttactcggcgaagacgtggcagaaaagctcgccagcgagttggcgcggctacgcgatgtctccacaacaagaggggaagctcacccgtcgtgcaaatgctgagcgggggtctggtcggtcagcgtgaacccgaggctggccgcgtggtcgaacgatgggcacagcgcctccacatactttgtctccagcggcggcacatggaccgcccagttgcggtcgtgacgatcaccgtgggcgatcaatgcgtcgaacgcgaggtaggtcgaaagcgcggaacgtgggtaggagcgcttggtcggcaggtgctgcgaaccgagcaagcgcctgctggatcgcctcgacgttgtgcccacgttgcccgggatcgtcccggtcgcagttgagcacaa

SEQ ID NO: 518 - DNA, 401 bp, Mycobacterium tuberculosis H37Rv
gcgcttggtcggcaggtgctgcgaaccgagcaagcgcctgctggatcgcctcgacgttgtgcccacgttgcccgggatcgtcccggtcgcagttgagcacaacctcgggcatcaatgcttgcggcaaccgcacgtccttgaccagcgcaccgcgcacgccgtcacggacagccagctggaccggtgccgcaggtatcccgactagggcgtgtctcccaatttcggagttcccactcgggcgtggatgacggcgcaggccagcaggacgccgccgaggtaggtcagggcgtatttgtcgtagcgggttgcgatgccgcgccactgcttgagtcgatggaagccgcgttcgacggtgttgcgtagcccgtagagcgcggcgtcgaatgctggtggccgcccgc

SEQ ID NO: 519 - DNA, 401 bp, Mycobacterium tuberculosis H37Rv
cagggcgtattcggtgctggcatggcgatagtcgtcgagcaggggcagcagttgcgggttgtcgccggcctggcctgcggtcaaccggatccgcaccggggcttcgcgctgatcggtcagggcatggatcttggtggtcagcccgccgcgcgagcggccgatcgcatgatcgtcgggttcatcggcggatttcttgtaatccgacagtgccccctgtggcgagcgtgtccgagcaggcgcccgccgaatgctggtgtgcccgcacgttcgtggaatccaccgacagcagcttctcgatatcctcggccacctcagcgtccaccccgaacaccgcggcaacgtgggcgaacacctcgtcgcaggtaccatccagcgaccaacggtgatggcgcttccacacc

SEQ ID NO: 520 - DNA, 401 bp, Mycobacterium tuberculosis H37Rv
gagttcgtcgagtgctcggatcacttcgctcgacgggatgccgcgatagaagggtgccgcgttcggtccggtgcccgtcgacggtgcttccgcagagtcctcgaccacgaggccgatcacacggccgtcttgcgcaacgatcggaccgccgctgttgcccggccgcgcgattgccgagtagaggaaaatcttctgccggccggggatagtcgtcgcggccgggttgaccacctcgccacgctgcaccgtgatcgccatctccgcagtcatcggcacccgcgggtaaccgaacacgtagacctcatccgcccagtcgggatcacggaacgccatgccgccaagccgcgggatgtacttgccttcgggcatctcgaatttgattactgcgacgtcgagcgtgg

SEQ ID NO: 521 - DNA, 401 bp, Mycobacterium tuberculosis H37Rv
gagcccggtcacgacatgtttgttggtgatgacgtgattgtggtcgacgacgaggccggttccccaactatccaccggattgccagcgtcgtcgtgaccggcgagttgaacggtcaccgcgttgtagctcgggatgatgagctcggcaccgaacacctcggacaaccagaggttgccgccacgctgtcccttcgatatcgccccctgcgagatgtacttctgccccatgactggcaatcgcgggtcccaaccgagcggcagcagaagtcccgcgcgttccatcgagctgaggatgcggtggagggtcaccgcgtcgcccgcggcgggcaggccgagggtgctcaggtatcgggagaaatctgcgaccgaccacggttcgaagggcaccgtcgtcggcagac

SEQ ID NO: 522 - DNA, 401 bp, Mycobacterium tuberculosis H37Rv
tcgcgatgattgttgtcgcacagttcgcggccacgctcaccgacgacaccggcgctccgctgctgttggtcaaaggcggatcgtcgctggaactgcgccggggaattcccgattcgcggacctccaaagacttcgacacggtcgcacgtcgcgatatcgaattaatccatgaacagctcgctgacgcgggcgagacggggtgggaaggattcactgcaatcttcaccgcccccgaagaaatcgatgttcctggtatgccggtcaagccgcgccgattcaccgccaagctgagctaccgaggccgggctttcgcaactgttccgatcgaggtctcctccgtcgaagccggcaatgccgaccaattcgacaccctcacctcagacgcgctcggcctcgtgggc

SEQ ID NO: 523 - DNA, 401 bp, Mycobacterium tuberculosis H37Rv
ggaaacctggtgtttggccggaacgtggcgccgagcctcgataatatcagcagttacgtccaggggtgtggtgtacgggcaggtaaggccggtgggcgtgtcgtagcccagtagtgggcggtcatcgcgtgatccttcgaaacgaccagcaaaagtcaatcgaaggaaatgacgcaatgacctcttctcatcttatcgacgccgagcagcttctggctgaccaactcgcacaggcgagcccggatctgctgcgcgggctgctctcgacgttcatcgccgccttgatgggggctgaagccgacgccctgtgcggggcgggctaccgcgaacgcagcgatgagcggtccaatcagcgcaacggctaccgccaccgtgatttcgacacccgtgccgcaaccatc

SEQ ID NO: 524 - DNA, 401 bp, Mycobacterium tuberculosis H37Rv
gtatccactcgccggatggagcgcctggtcgaaacacttggtgtgacaaagctttccaagtcgcaagtgtcgatcatggccaaagagctcgacgaagccgtagaggcgtttcggacccgcccgctcgatgccggcccgtataccttcctcgccgccgacgccctggtgctcaaggtgcgcgaggcaggccgcgtcgtcggggtgcacaccttgatcgccaccggcgtcaacgccgagggctaccgagagatcctgggcatccaggtcacctccgccgaggacggggccggctggctggcgttcttccgcgacctggtcgcccgcggcctgtccggggtcgcgctggtcaccagcgacgcccacgccggcctggtggccgcgatcggcgccaccctgcccgc

SEQ ID NO: 525 - DNA, 401 bp, Mycobacterium tuberculosis H37Rv
acaccccagcactgaccacctagactgccacccgaaggatcacgcgaggaaccttcactcgtacaccacgtccctggccttggccgaaggtagaacgccagcacgacttgctgttgtcaactcttgcgagttacgtgagtgcggccggagcacacgctcgtatcgtcgtcacagtcgaagggcgcgatcttgagttcgacgtatcgaccttcgcccttgtgggcccgcagcagctgcccgaagtcgagccgtcgcagtagtgaccgggggcccagttagcgatggctttgtcactgtggagggtctccctcccgtagtgatgcaccactcgcacgagagccaattcggccgcccgtcgcgccgcagcagagcgcggtggctcttcgtcgttcatttggtca

SEQ ID NO: 526 - DNA, 401 bp, Mycobacterium tuberculosis H37Rv
tcgcgaatttcctgcacgctgctcgtgtcgaggttgaacgccaccccgtcgtcgatgtcgatcacggcgatgtcgcgaaccacctgggtgagatgctcggcggtgacgtcggcgcgcatggcgttggagtcggtgtccttcgtcgggtgccgaacgccgtaggcggccagcaggatccggcctttgaggacgaagtctgcggcatgcgaggtgcgggtgagccgatccaggaacgattcgagggtgtgtcgagtcaggtactcctgcgtcggtgcgccggtcccgcacttcgaggcagtagaacgagcgaggattggatccggcgggacaccgtgtcgccggagctcacgccagcatcgccaatgtttgtaagaccggggacttctcccgcggtaggcggg

SEQ ID NO: 527 - DNA, 401 bp, Mycobacterium tuberculosis H37Rv
taccgtcgacgcggtggcaaccaggcatcaacgggcggggattgacgaccgctggcataagcgggtcaaagggccggacgggaacaggcgaaccgtgcggtctgctgtctgcggcagggtttcgcgctggcgcgtcaggtgggttgacggcggcggagaggagcacagcaagagcttccagcgcaaacctgacgcgcaggtacctgacccatgccgaactgttgatgctcgccagggccacgggccggttcgaaacgctcaccttggtgctcggctactgcggcttacggcggtttacggttcggtgaggctgttgccctgcggcgcaagcatgtgggggatcgcgtgctgaccgtccgatcgtcccctacggcggtgaccggcaagggcatcgttgagtc

SEQ ID NO: 528 - DNA, 401 bp, Mycobacterium tuberculosis H37Rv
gagacctgcctactcgtgtgcaatgtgatattagcctcattttgatttgaattatgagaatttcttatttcccagttatggggagcgtgtgctggttgttagcgaagtacgctaaaactgcagttactgctcatagcactggtttgccacataccccgtatcgggatacgtcatgatcggtatcctgagcggaacataagtcggtcacgtgacctaggtaacagcgtctaattcgtgaaatttttgatcagaatttggtcgctagacttattccagcccagtatgaatcagcgcttttggtgccgaaatgcggcgaatcccgggcagtcggcgtcgcacagcacggttgctgtgctgtcgcaagcctggaggcccgcagacacagcaagcgaggagcggcg

SEQ ID NO: 529 - DNA, 401 bp, Mycobacterium tuberculosis H37Rv
ggccccggcgttgccgccgacaccgccaccgccaccgttaccacctagtgcggcgttgagcccggtgccgccgtcgcccccggagttgccggcgccgccggccccgccgttgccatacagcagcccaccgccaccaccggcgccgccgccgccgccgtcgccgccgacaccacccgtaccacccttaccggcggtggccacgacatgttcgccgccggcgccggcggccgcgccgttgccgccggcgccgccgtgcccggcgttacctccgtgaccgaacagcacggcgcctcgtccgccgttgccgccggcgccggcggtgccgccggtgccgccggtgccgccgtctccaccgaattggccgccgttgccggcaccgccggcggtgccgccgccgccgc

SEQ ID NO: 530 - DNA, 401 bp, Mycobacterium tuberculosis H37Rv
cgccgccgttggcgccggctccgccggcccctccgttgccgccgttgccgatcaacccggccgacccgccggtacccccggtgagcccggcggtggtttgggaaaacccgttgccgccgttgccgtacaacaacccaccggcgccaccgttgggattggccgcggtcccatcggcgccgttgccgatcagcggacgccccaacagcgcctgggtgggcgcgttgatcaaacccagcacctgctgttcgacgttggtcgcctcggcgctggcatacgcgcccgcacttgacgtcagggccagcgtgaactggtcatgaaacgctgccatctgccgggcgatcgcctgatagccctcgccatgtccgctaaacagtgccgcaatgtgggccgacacttcgtcg

SEQ ID NO: 531 - DNA, 401 bp, Mycobacterium tuberculosis H37Rv
ttgccgatcaacccggccgacccgccggtacccccggtgagcccggcggtggtttgggaaaacccgttgccgccgttgccgtacaacaacccaccggcgccaccgttgggattggccgcggtcccatcggcgccgttgccgatcagcggacgccccaacagcgcctgggtgggcgcgttgatcaaacccagcacctgctgttcgacgttggtcgcctcggcgctggcatacgcgcccgcacttgacgtcagggccagcgtgaactggtcatgaaacgctgccatctgccgggcgatcgcctgatagccctcgccatgtccgctaaacagtgccgcaatgtgggccgacacttcgtcggcggcggccggcaacaacctcgtcgtcgcggccgcggccgccct

SEQ ID NO: 532 - DNA, 401 bp, Mycobacterium tuberculosis H37Rv
ccagttcgtcaaagacgtcgaacgcctggaatacatccggcgcgccggctggactcacatcagggtgctggcagaccacaagggacccgacgtcgtccgccgggttcggcaggcttgggacacgttgacatcacgacgttgactctgcgcccaccacgtgtcctactcgcacttttgcgtggtggacgcagagtcaacgcactcgagcgcctcgctcacgcgaggcgctcgatcaccatcgccatgccctggccgccaccgacacacatggtttccagaccgaacgtcttgtcgtaggtctgcaggttgttcaacagcgtggtggtgatgcgcgcgcccgtcataccgaacgggtgacctagggcgatcgcgccacctgagatgttgagcttgtcctcgtc

SEQ ID NO: 533 - DNA, 401 bp, Mycobacterium tuberculosis H37Rv
cagttcgtcaaagacgtcgaacgcctggaatacatccggcgcgccggctggactcacatcagggtgctggcagaccacaagggacccgacgtcgtccgccgggttcggcaggcttgggacacgttgacatcacgacgttgactctgcgcccaccacgtgtcctactcgcacttttgcgtggtggacgcagagtcaacgcactcgagcgcctcgctcacgcgaggcgctcgatcaccatcgccatgccctggccgccaccgacacacatggtttccagaccgaacgtcttgtcgtaggtctgcaggttgttcaacagcgtggtggtgatgcgcgcgcccgtcataccgaacgggtgacctagggcgatcgcgccacctgagatgttgagcttgtcctcgtcg

SEQ ID NO: 534 - DNA, 401 bp, Mycobacterium tuberculosis H37Rv
acgttgactctgcgcccaccacgtgtcctactcgcacttttgcgtggtggacgcagagtcaacgcactcgagcgcctcgctcacgcgaggcgctcgatcaccatcgccatgccctggccgccaccgacacacatggtttccagaccgaacgtcttgtcgtaggtctgcaggttgttcaacagcgtggtggtgatgcgcgcgcccgtcataccgaacgggtgacctagggcgatcgcgccacctgagatgttgagcttgtcctcgtcgatgcccagctcgcgcgccgagcccaggacctgcaccgcgaaggcctcgttgatctcgaccaggtcgatgtcggtgatcgccatcccggctctttccagcgccttcttggacgcctcgatcggccctaagcccat

SEQ ID NO: 535 - DNA, 401 bp, Mycobacterium tuberculosis H37Rv
atacgtagtgctggttggcatcggttgggtgatcatgctggtcactcagacgtcgtcgtgcgtcaccagcattagtgagtacgacgtcggccagttctgcgtttcccagccgtcgatgatcggccagttggtgcagtggttgttgtcggtgggcggattggcttacctggtctggaactacggctatcgccagggcaccatcgggtcgagcatcggcaagtcggtgctgaagttcaaggtggtcagcgagaccaccgggcaaccaatcggcttcgggatgtcggtggtacgccagcttgcccactttatcgacgcgatcatctgcttcgtcgggttcctgtttccgctgtgggacgctaaacggcaaacgttggcggacaagatcatgacgacggtgtgcg

SEQ ID NO: 536 - DNA, 401 bp, Mycobacterium tuberculosis H37Rv
gagtggtacggctcggcgctgactagggtcaccgacacggtgctgccgttgggcaccgtgtagctgcgggtctcgccgaccttggcgtcgatcagggccccaccgagcggtgaattcggcgagtagacctcgagcttgccgtcgctgacgccctcctggcgggtggcgatgaggaacgtttcgctgtccgacttgtcgccgttgtagtacaccttgaccacagaaccgggtaatgcgacgccggattgcttgggtgcctcgccaacctttgcgttgctgagcaagtcctgcagctggcgaatgcgggcctcctgctggccctgctcctcgcgggcggcgtggtatccgccgttctcgcgcaggtcgccttcttcgcggcggtcgttgatttcggcggcgat

SEQ ID NO: 537 - DNA, 401 bp, Mycobacterium tuberculosis H37Rv
agggtatctcggaaaacctgtacacctcaggccaacccgaccccgatttggtgatacgcacctccggcgagcaacgcttgtccgggttcttgctgtggcaaagcgcctactcggagatgtggttcaccgaggcgcactggccggcgtttcgccacgtcgattttctacgcgcgctgcgtgactacagtgcgaggcatcgcagctacggcaggtgaatccggcgcaggacgcctatgttgcgctgttcggctgcctgcgcagagtgcacattagccggctcgtcatgctgtgcaatctgcccaggtgaaacccggtgtttgggatcctggatagcgataccatcgactgatccatgcgggacatccgatgctggactgatcggagtaaggcgatgtcgtttg

SEQ ID NO: 538 - DNA, 401 bp, Mycobacterium tuberculosis H37Rv
gtcggcgggatcggcggcgacgccgcagccggcggcgccggtggggccggaggcaacggtggggccggaggcaacggtgggtggttgttcggcaatggtggtgccggcggctccggtggcgacggcggcgccgccggccgtggcggtgccggcaacttgggctcggccgggggtatcaacgcccccgccggtaaccccggcagcggctcggtcggcatcggcggtgccggtggtgccggcggcaccgccgggctgttcggcgacggtggggctggtggggccggtggtgccggcgccgccggcggcttcggcggcatcagcgccgccaccccctcggcgggcagtgagggcgccatgggtggggccggtggtgttggcggcaacgccaggctgttgggcac

SEQ ID NO: 539 - DNA, 401 bp, Mycobacterium tuberculosis H37Rv
cggttgatgctgtgagtcgggcacaaaccgcccaccgctactcgtgacctacgtggcagctggggcactagtggctgccgtttgcggtgcagacgtgcaacggtggatggcgtgtgctgcattaagggtaatcagcccgggagcggctcgctggatacactggcgcccgtgactgctgcacctgacgctcgcactaccgcggtaatgtctgccccgctcgctgaggttgaccccgatatcgccgagttgctggccaaggagcttggtcggcaacgagacaccctggagatgatcgcctcggagaacttcgtaccgcgcgctgtgctgcaggcccagggcagtgtgctgaccaacaagtacgccgagggactgcccgggcggcgctactacggcggttgtga

SEQ ID NO: 540 - DNA, 401 bp, Mycobacterium tuberculosis H37Rv
ccgtcgacgtggtgtaccagttcatcccggtgctcaaagccaacggctatcgcctggtgaccgtcagcgagctgctcgggccgagggcgccaggaagcagttacggcagccgggaaaacggtccacccgtcaacgaactgcgtgacattccggccagcgagatcccgccgttgcccaacacctcatcgcccaagccgatgcccaacttcccgatcaccgatattgcgggtcagaattcgggcgggccaaataacggtgcgtaacctcaggacttgttgaccttcagcgcctcaatgaccctctcgacggtggcgcgcgaggttgcatcaccgatgggggtggcgcccaggaagacggtgaccggcttggtgtcgaccgcgatgatcgtgaccgaatcacct

SEQ ID NO: 541 - DNA, 401 bp, Mycobacterium tuberculosis H37Rv
ggaggccgatcaccaggatcaccaccagtaggatgacacccagcaccgcgaggccggcgaggatcagccacggtgtcttcgatcctggcccgggcggaggtggtcctggcggatagggccccgccggccagccgggcggatactgctggggtgggtaggccggcggataggagccgccctgcggttggcctccccaatacgggtcctgcccatacgtattcgggccgtaggggtagttgccgtaggggccagcgggaggaaccgtcatagccgatcgctgtcgagctgctcggccttggccattgccagcacgtccagacggcggtccagatcctcgatcgacagcctgtcgccgatcaggccacggtcgatcacggtttggcgaatcgttttgcgttcct

SEQ ID NO: 542 - DNA, 401 bp, Mycobacterium tuberculosis H37Rv
ccggaccgggcggggccacccagctggcaatcaccggtgccggcagcatcgatcagttccgcacgctggcgtcggcgacgcaatcgcagcccccgttgcccgcacgatagcgggtctcactcagcggttgacggaggcggggcgtttcttgacgtggccgggcctcgacgcggcagccacctgcggcggacgggtggtgcttcgaactgttccagttcgacgcctttgtacaccgcgaggtagacgtcgatggtggtgacgatgaggatcatcagcaccgggccgatgatgataccccaggggccgaacatggtgataccggcgaacaccgacagcaacatcagcgccgagttcagccgcgcgtcgcgcggcaccaggatcggccgcaggacgttgtcgat

SEQ ID NO: 543 - DNA, 401 bp, Mycobacterium tuberculosis H37Rv
gactctgcgtccagcaggcgggttactcgcactattgcgtggtggatgcagagtcaacggatgtcggtgcagtgctgtagacctatgccaccacccaatcgaggtcgaacgcgttgccgatggcctcggctagagccggctcctgcgacgcgagcaggtagccgatttgacgaccaaggtcacacaccgggatcgtttgggtgttgtcgcagctgacgactgacggttgattcagcccgttcaccgcgtctaccgggacttcggtggctagcccacgcacggttgtcgtgatcggggcgacggtgacgttcgtgaggtgcggacgtacgacctcgcgggtaaggatcaggacgggtctagccttgtcaagctgtgcgatgtggataggtcgcatcagtcga

SEQ ID NO: 544 - DNA, 401 bp, Mycobacterium tuberculosis H37Rv
atcagggtgaggttgcgacgaagcgtcgagcgggctcggtggacctcctcggcgcgcacgctgaccatcgtcatcggatcggccagcaccgggcggctacgcaactgcgcgactgcccgttgctcgcgggaaacccagttgcgcaacgcctgggcgctgcgccggcgcagatcgtcgatcagccgctgctcggctgcggtgtcgggaaccactttcttggcggcgtcggtgggggtggcggcgcgcaggtcgacgaccagatcgcacagcggattgtcgggttcgtgaccgacggcgctgaccacgggcgtacggcaggccgcgatcgcgcggcacaacgtctcgtcagaaaacggcagcaggtcctcgacggagccgccgccccgggccagcacgatcac

SEQ ID NO: 545 - DNA, 401 bp, Mycobacterium tuberculosis H37Rv
gcggacagcaccaggtcgcgggaacacgtcacggtcagcgacatgtcggccgcaggatcgcgcaataccatgaacaccgtcttggcgtctgggcgcattgtgatctgggccaattgcccctccacccagaccgcgcccagcttgtcgatccagcccgcgacccggattgccaccgcgcgaaccgggaacggattctccgctgaattctgggtcacttcgcagtcgcgcgggtgatcctgttggcgagcagcgtctggaacggggcacgggccttggtggcctgctcgtaggccagcagggcctcgagctcggggacatcgagcgtgtgcagcctggcccgcagctgggccagcgtcagcgccggatagtcgagttcggctgccaccgcaggcgtcggaact

SEQ ID NO: 546 - DNA, 401 bp, Mycobacterium tuberculosis H37Rv
tgcccaacgtcggcaagtcgacacttttcaacgcgctgacccgaaacaacgtggtcgcggccaactacccgttcgcgacgatcgaaccgaacgaaggtgtcgtctccctgcccgatccccgcctggacaagcttgctgagcttttcggatcgcagcgagtcgtacccgcgccggtcaccttcgtggatatcgccggcctggtcaagggggcgtccgagggagccgggctgggtaacaagttcctggctcatatccgcgaatgcgacgccatttgtcaggtggtgcgggtgttcgtcgacgacgacgtgactcatgtcaccggacgggtcgatccccagtccgacattgaggtcgtcgagaccgagctgatcctggcagatctgcaaaccctggagcgggcc

SEQ ID NO: 547 - DNA, 401 bp, Mycobacterium tuberculosis H37Rv
tcggccatgttcattgcccgatttggcgcgatagcgtgatttatgttgatttgttacattcgcactgaacccttccgtatctatttttatattgttgcgtgacatatccgctgtacgcgtgggacgggccattatttggataatgcgtgataagcaccacaagaattgatttcctatggatattgtcggtagcgttcgcgtccatgattgctcttgcaacgctgttgacgcttatcaatcaagtcgtcggcactccgtatattcccggtggcgattctcccgccgggaccgactgctcggagctggcttcgtgggtatcgaatgcggcgacggccaggccggttttcggagataggttcaacaccggcaacgaggaagccgccttggcggctcggggcttt

SEQ ID NO: 548 - DNA, 401 bp, Mycobacterium tuberculosis H37Rv
accgcaccgcctgttcggcgcgggcgaacgcgatcatgaacccgtcaccctgactcgtgaccatgtgcccggaccagcgccgcaccagctcatgaaccagcttgtcatgcgcgccaatcaacttgacccatgtgcgatccccgattcgttcgtcgagcgcggtggactcctcgatgtcggagaacaggatcaccacccggccgtccggggttacccgagccaggtcgggacgctctacctcggcccagtcggcggggtcctcgatcgagctgcgcacggccgctccgaacccttctttgcgcaccaggttcgcggtctgccagaccgtctttaccgcttcacgaccacccgacagcattgcgggcgtcgagccgctcccgcggttgctcggtttcctggcg

SEQ ID NO: 549 - DNA, 401 bp, Mycobacterium tuberculosis H37Rv
gaagaccaaatcctgcgtgtggaccactttctgggcaagcagcccgtcgtcgagctggagtacctgaggttcgccaatcaggcgttagccgagctctgggatcgcaacagcatctccgagatccacatcaccatggccgaggacttcggggtggaggaccgcggcaagttttacgacgccgtcggtgccctgcgtgacgtcgtgcaaaaccatctgctgcaggtgctggcgctggtgacgatggaaccgccggtcggttccagcgccgatgacctcaacgacaagaaggccgaggtcttccgggcgatggcgccgctggatcccgatcggtgcgtgcgtgggcagtacctcggctacaccgaagttgcgggcgtagcaagcgattcggcgaccgaaacgta

SEQ ID NO: 550 - DNA, 401 bp, Mycobacterium tuberculosis H37Rv
ccaccgatctggaacgtgccgtcgcgcaggtctaccgtcgagcccgtgggtgtccgggcttagggatgcgagttcaggaccgtggtgctctggcctacccgcagtgggtgcccacacccgtgcaacgtgaccaactggtctgccacgacctggccgatcgcagctggcaaggttgtctggcggccgttgtcggcctcgccagcaagcagctggatatgcgccggatgccctggcggctgcacgtgttcaccccggtgcacgacgttccgggcgtcagcggcctcggcaccgtcgccgtcatgcagttcgcgcatgcgctgggcgacggcgcgcgggcttcggcgatggccgcgtggctgttcggccggccggccgcggttcccgaaatagccaggtcgcgt

SEQ ID NO: 551 - DNA, 401 bp, Mycobacterium tuberculosis H37Rv
ctgctgcggcggcgctcgcaactagccggtcccacggtgaccgtcacggtgctcgccgcggtgtccaccgggctgttgggtctgcttggcggggatgtggacacgctaggcgccgaagtacccatggccaaaccgggtgtgccacggtcatataaccacttcggcaacgttgtcgttgggctgtacccgcggctggagccggatgagcgggtgcggcggatcgcaaccgatttggccaacgctcgccgtcgctttgaacatccggcgatgctctccgctgaccgggcctttgcggcggtaccggcggcgctgctgcgttggggcgtatcgcagttcgacgctgaggtgcggccggtgcgggtggccggcaataccgtggtgtccagtgtttatcgcggggc

SEQ ID NO: 552 - DNA, 401 bp, Mycobacterium tuberculosis H37Rv
tgactggcggcaccccccacctcggtgacaatgccttgcgcggcaagcatgcccatgacgtcctccggtctggtgtgatctcgcaccaagatgaccggctcgccccggtccgcagcgtccagcgcctcgtccacctcggtgtaggcggtcccggataccacgcccgggcaagcgggcaggcccttggccaaaagcggtgcagccaaccgtgtttccgtctgcagcgacggccgtagcaaagtctcgatgtgcgtcggagtcacccggcgcagtgtctcggtgtcgtcgatgagtccctcgtgatgcagttgcagcgccagtcgcacggcggcctgcgccgagcgttccgccccgcgggtctgcagcagccacagctggctgtcctccacggtgaattcgat

SEQ ID NO: 553 - DNA, 401 bp, Mycobacterium tuberculosis H37Rv
cacctcggtgacaatgccttgcgcggcaagcatgcccatgacgtcctccggtctggtgtgatctcgcaccaagatgaccggctcgccccggtccgcagcgtccagcgcctcgtccacctcggtgtaggcggtcccggataccacgcccgggcaagcgggcaggcccttggccaaaagcggtgcagccaaccgtgtttccgtctgcagcgacggccgtagcaaagtctcgatgtgcgtcggagtcacccggcgcagtgtctcggtgtcgtcgatgagtccctcgtgatgcagttgcagcgccagtcgcacggcggcctgcgccgagcgttccgccccgcgggtctgcagcagccacagctggctgtcctccacggtgaattcgatctcctggacgtcgcctg

SEQ ID NO: 554 - DNA, 401 bp, Mycobacterium tuberculosis H37Rv
gtgatgggccgctggtcattctccaactggttgacatagcttgtggataagtccagggccttggccagcgccacctgggtgagcccgcgctcttgacgtaaccgccgcaggcgggcaccggaaaacgtcctcgaatacgtcctagccaccggtaagacattactccgcgtcatgttcgcaaaatttgcaaaatgtgccggatcaggacacaaaagtacgctttttcagggtcttttgttggtgtcctgtgctgcgtatggtgcggattatgttgatgcatgcggtccgggcgtggcgcagcgccgacgatttcccgtgcaccgagcacatggcctacaagatcgcccaggtggctgccgatccggttgacgtcgacccggaggtagcggacatggtgtgca

SEQ ID NO: 555 - DNA, 401 bp, Mycobacterium tuberculosis H37Rv
ctccaactggttgacatagcttgtggataagtccagggccttggccagcgccacctgggtgagcccgcgctcttgacgtaaccgccgcaggcgggcaccggaaaacgtcctcgaatacgtcctagccaccggtaagacattactccgcgtcatgttcgcaaaatttgcaaaatgtgccggatcaggacacaaaagtacgctttttcagggtcttttgttggtgtcctgtgctgcgtatggtgcggattatgttgatgcatgcggtccgggcgtggcgcagcgccgacgatttcccgtgcaccgagcacatggcctacaagatcgcccaggtggctgccgatccggttgacgtcgacccggaggtagcggacatggtgtgcaaccgcatcatcgacaacgct

SEQ ID NO: 556 - DNA, 401 bp, Mycobacterium tuberculosis H37Rv
cgctatcactgcgccgatccggccaaaaaggcgttcggggcgcgcgcggaggtgacgctgcacagcggtgaagtgatcgtggacgaactggcggtggccgacgcccatccgctgggcacccggccgttcgagcgcaagcagtacgtagagaagttcaccgagctcgccgatggtgtagtggaacccgttgaacagcaacggttcctggccgtagtagagagtctcgccgatctcgagagcggtgccgtgggtgggctgaacgtgttggtcgatccgcgggtgctggacaaagcgccggtgattccaccaggaatctttcgatgaccgggccgctcgcggcggccaggtccgtcgctgccacgaaatcgatgaccgcgcccaccgttgatgagcggcccgac

SEQ ID NO: 557 - DNA, 401 bp, Mycobacterium tuberculosis H37Rv
attcttcccgccgatgggctcgatcctgtactggatgaggttcggcaccatccggctgccgccgtggccggatcgagtgccgtggacccgcggcaccaagcgcaagccggtggacgttgccctctacgcactgctggtgatgatgttgctgtcggcgctgttcaccgatggcgccggccccataccggagctgggcaccacggtcgggctgctgcccgcctggcagatcgtgctgatcctgctgcttctcggtgtgctgggcctgcgcgacaaggtgatcttcctggccgcccgcggcgaggtctacgcgacgctgacggtgacgtttttgttcggccgcttgaacggtatagacatgatcgtggccgccaaactggtgttcctggtgatctggatcggtg

SEQ ID NO: 558 - DNA, 401 bp, Mycobacterium tuberculosis H37Rv
tccagcgagtacggcacgtgcagtgtcgagcacgacgtcgagacggccacggtagccgccgaacccagcagggtcgccaacgtgcccaacgccgcctccaggtcggtgcgccagacgttgcgcccgtcgacgaccccggccaccagcgtcttgccggccagctcgggtaccccggccaccgaggtgtcggcaccggccaccaggtcgacgccgatggcttcgaccggggtgcgagccagcgccggtagggccgcgcccgggtccccgaagtaggtggcgacatagatcgcaggccggttgctcaccgagcacagcgcggtgtacaccgcttcagccagggcgggcgcgtcgggggagaggtcggtcaccagcgccggctcgtcgaactgcacccactgggc

SEQ ID NO: 559 - DNA, 401 bp, Mycobacterium tuberculosis H37Rv
tcggtggcaggtcaactgtcagccaacggaactggccgcccgggatggccacgtccaaacgccaaaagctggtttgcaagccctccgccaacgccaccacggtggccgctgggtgctgatcgagataatgctgtgccgccatgtcgaaggcccgtgctcgtagggcgaagccctggccggtagggccgaacttcgcgaagtcgaagtcgatcgactcgaccagggctaccgccatcggatcgtcgataatggcatcgcggcggcgggcctctgcggcccgggcgttcagcgtcagcaaggcggtctcggagactccggtgagtgcgacccgctgtttggcgggcttatgggcactcaccgcaacaccttagccagcgtgcgcaggttgcgggtcgtggtcg

SEQ ID NO: 560 - DNA, 401 bp, Mycobacterium tuberculosis H37Rv
gtccaaacgccaaaagctggtttgcaagccctccgccaacgccaccacggtggccgctgggtgctgatcgagataatgctgtgccgccatgtcgaaggcccgtgctcgtagggcgaagccctggccggtagggccgaacttcgcgaagtcgaagtcgatcgactcgaccagggctaccgccatcggatcgtcgataatggcatcgcggcggcgggcctctgcggcccgggcgttcagcgtcagcaaggcggtctcggagactccggtgagtgcgacccgctgtttggcgggcttatgggcactcaccgcaacaccttagccagcgtgcgcaggttgcgggtcgtggtcgacgacttgtagcgcttcttgcccatcgtctggccgatggtgctgtccagggt

SEQ ID NO: 561 - DNA, 401 bp, Mycobacterium tuberculosis H37Rv
aggtatcgatcgccgagccgcgagccaagactcgcaacctgcgtcgcgacccacgggcttcgatcctggtcgacgccgacgacggatggtcatacgccgttgctgagggcactgcgcaactgacacctcctgcggcggcgcccgatgacgacaccgtggaggcgctgattgccttgtatcgcaacatcgctggcgagcattcggactgggacgactaccggcaggcgatggtcaccgatcggcgtgtgttgctgacgctgccgatctcgcacgtatacggcctgccgcccggtatgcgctaacccccggggctgcggacctacggactgggtcggattgcctcgctgctcggcgggccgcatcctgcggcccgcatcgtcgcgaggctgggtcggattgcc

SEQ ID NO: 562 - DNA, 401 bp, Mycobacterium tuberculosis H37Rv
ggcggccgaactgcacgatgtcgactgggtaccagccgaccgcggctggattgcggacctggcgcgaaccctcaacgggtccgccgcagatgtccaccgtcgctgttaggaaaccgacggtgtggttgacggtggccgccgtcaacttggttagaacaacgtgacaaaacgttaacttgggtttgcatgcccgtagcgattacgatggttttctggacgcgtggcgacaacttccgggcaggacgctgacgcccatccatcgagatacccgatgttgacgagaggggtccccgacccggcggaccggggcttgacgggcgcaatgcggcgcggccggccagcccgtaacgtccagcgagtgcggtcgcgcgccgacggcccggccccacaccgctcatgac

SEQ ID NO: 563 - DNA, 401 bp, Mycobacterium tuberculosis H37Rv
ccgttgtcgtgccgcagggctcactgggattccgtttcggtgaggacggtgttgggaagtggaacctggacctgggttcggtggtgccggcgctaagtgtggagatggacaaggctgtcaacggcgatcgcagtgctgaactggttacgctgcccagctttgacaccatcgacgggcacggtgagacggtgtcgcgtggggtgccggtgcgccgggcgggcaagcatctggtgtgcacggtgttcgatctgatgttggcccactacggggtggcgcgtgcggggctgcccggcgaatggccgaccggctaccacgaccgaacccagcagaacaccccggcctggcaggagtcgatcaccggtgtgccggccgcgcaggcaatccggtttgccaaggaattc

SEQ ID NO: 564 - DNA, 401 bp, Mycobacterium tuberculosis H37Rv
cagcgacattccagagggcaagctcgacctgataatgtcgatcgacttccggatgacgtcgacgacgctggtgtcggatgtcgtgttgcccgccgcgacctggtacgagaaatccgacctgtccagtaccgatatgcacccgtacgtgcactcgttcagtccggcgatcgatccgccgtgggaaacccgttcggactttgacgcattcgccgccatcgcgcgtgctttcagtgcgctggcgaaacgtcatctgggcactcgcaccgatgtggtgctgaccgcgctgcagcacgacaccccggatgagatggcatatcccgatggcaccgaacgtgattggctggcgaccggagaagtcccggtgccaggcaggacgatgagcaagctcactgtggtggagc

SEQ ID NO: 565 - DNA, 401 bp, Mycobacterium tuberculosis H37Rv
cctggtgctggtgtgcgcgatcgtggctggcctggcatgcacgctgatgggcgccacccatgagggcgatatgcacgattaccggcgctcggtgtcggtctggttccgctcgatctggatgctagcgccgcgtggcgatctgatggcccaggcgacgctgtactaccaggtgcatgtgctgatcgcgctcgcgctgtttgcgctctggccgtttacccgattggtgcacgcgttcagcgcgccgatcgcctacctgttccggccctacatcgtgtaccgcagccgcgaggtggcggccaagcacgaattgatcggttccgcgccgcgtcgtcgtgggtggtagttctctgccacaatcaccgtcgtgccattccgcaacgttgccatcgtcgcgcacgtcg

SEQ ID NO: 566 - DNA, 401 bp, Mycobacterium tuberculosis H37Rv
cacgtcgaccacggcaagaccaccctggttgacgccatgttgcggcagtccggggcgctgcgtgaacgcggtgagctgcaggaacgggtgatggacacgggcgatctggagcgggagaagggcatcaccatcctggccaagaacaccgccgtgcaccgccatcacccggatggaaccgtcaccgtaatcaatgtcatagacaccccggggcacgcggacttcggtggcgaggtggagcgcgggctgtccatggtggacggggtgctgctgctggtcgacgcctccgagggtccattgccgcagacgcggtttgttctgcgtaaagcgctggccgcccatttgccggtgattctggtggtcaacaagacagaccggcccgacgcccgcatcgccgaggtcgt

SEQ ID NO: 567 - DNA, 401 bp, Mycobacterium tuberculosis H37Rv
attgcgttgccgatcgactcggcggccagagccggcagcgccgcggcggcggccgctccggcgcgcggcagcagggcgccgacggcggacaaaccgctggccccaccggtgggttggagctgcagtgcaccgctggcagcggcatttgcagcggcgctaccgccaagtgcactggagccgccagtgccgaggaacatgctttggacccggctcagcgcgttcgagcccccacccgtcgaggcgtcggcgctaatcagtggatgccccagcaacgctcttgcgggcgcattcacggcgttcaccatggtctgcgcggcgctggcctcggcggttgcatacgcgtctgcacttgctctcagcgcctgcacgaactggtcgtggaaggctgtcatcatctgccg

SEQ ID NO: 568 - DNA, 401 bp, Mycobacterium tuberculosis H37Rv
ttcaccacgcggcggctgtcgccgggggcttgttcagacgctggcctctcacggatggtatcgcgatcggctgtgacctgcgccttactccaccaaaccgttggtgccggacggtcgacggcgtgccgagctcggcctggcgctactgttgcgcttatggcgccaaggttggccagcatctcacctggtggggcgtgcggatgatatcagattgcagggaaggtataccaacgtgccgcagcctgtaggtcggaagtccaccgctctgccgagtcccgttgtaccgccccaggcaaatgcctcagcgttgcggcgggtactgcgacgggcccgagatggtgtcacgctgaacgtggatgaggcggccatagcgatgaccgcacgcggtgacgagctggccg

SEQ ID NO: 569 - DNA, 401 bp, Mycobacterium tuberculosis H37Rv
agggtaccaggcgccgtgggcttgcttctctcaaactggttatcgggcgacactgcgcggccataccaatctgcaggtcagcagcgatgaaacaacgttgtttacagcccgagaaatgagtttatagcctggccgcaagttcggtgccttgcttgatggcgcgcttggcgtccaactcagcggcaaccgccgcgccaccgatgatgtgcgggttaatgccgtgccggcgcagttcactctccagatctcgcaccggttcctggccggcgcagaccactacgttgtccaccgccagcagctggggccgcctgcgcttcgggccgaagctgatgtgtaggccgtcgtcgttgatctgttcgtagttcaccccagacagctgatgaacgcccttggccttcaac

SEQ ID NO: 570 - DNA, 401 bp, Mycobacterium tuberculosis H37Rv
cggcatcgcgggccaactgcgcgcagcgggcgaaatccgcgatggtcgcttcgaccccgcgagccgatagtgctcgcggacgaaacggggtgatcggcgccttgatcggcgaggcgctgaccgcaagtgggtggtaggcgtagcgtccggcgtgcaggatttgcagcaggatctttgcacccgaatcgtggaccgccctggtgattcggcggtgccgtcgggcttgcgccgaagtgacgagttcggaggcgaacggcagcagccatccggtgcggttgggcgcgtagccaccggtgatgatcagcccgacgccgccgcgtgcacgttcggcgaagtagtcggcgagccgatcgatatggcgggcccggtcttccagtccggtgtgcatcgaacccataacc

SEQ ID NO: 571 - DNA, 401 bp, Mycobacterium tuberculosis H37Rv
gatgatggtgccggcgccggtacaggcggctatggtggccgcgctggacgacgacgcgcacgaaaggcaacagcgggagcgctacgcacaacggcgtgccgcgctgttgccggcgctgggctccgcgggttttgcggtcgactattcggacgccggattgtatctatgggccactcgcggcgagccgtgccgcgacagtgccgcgtggctggcgcagcggggcatcctggtggcaccgggtgatttctacggcccgggtggggctcagcacgtgcgggtggcgctgacggccaccgacgagcgggttgcggcggcggtcggacggctcacctgttagcgcgaacagacgcaacttgcggccgggtcaccgccaggtcgtgcgcagctgggttgtcaccgag

SEQ ID NO: 572 - DNA, 401 bp, Mycobacterium tuberculosis H37Rv
cgagcccgcacggcgggccagcgcgatgctgcacgcattggaggagatgccgcagccgcccgggtacgacacgaacgctctgaccgccgcccatgagtccagcatgagcggtgaggaactgcgaaaaatgtttaacagcttaggtattcagtatggtccggctttttcaggcctagttgcggtgcacacggcgcgcggggacgtcaccacagtgctcgccgaggtcgcgctgcctggagccatccgatctcagcagtcggcatatgccagccacccggccctgcttgatgcgtgtttccagtcggtgcttgttcatcccgaggtccagaaggcgactgtcggtggtctgatgctgcccgtgggcgtgcgtaggctgcgcaactatcactcgacgcgcagcg

SEQ ID NO: 573 - DNA, 401 bp, Mycobacterium tuberculosis H37Rv
ggaccatcaccgtgcctgccatggccacgctgctcggacgcgcaagttggtggcccggacacccttggcagcggtgcgcacccgaagaaggccagatgtcagcccggatgtcagcgcgcacgaagacggtatttcaagccgtggcagacggatcaaagcggtagtgtttagccgccgaaggcgggggagcccagtaagccgcgggcaccttccacgatcgagcccggagcggtcagcggatccaggcctcgcaccggatccacggagaccggccgggtgaaccaattgtcgttgcgtgcataggccgcgtcgatctgtggttgcagcacactgtcgatttgatcgacttcggcgtcggacatgccgaggtaacgcagcggcaaggtcaacgggaggtggtt

SEQ ID NO: 574 - DNA, 401 bp, Mycobacterium tuberculosis H37Rv
atgcgcgccgtgcccatgccctctataccgacgtcgacgccgcgttgcgggggggtctggccgatcggccactgctgaccatcttcggtcagttcaacgatccgctgcggtttcagccgcgctggaaagagttgtttccgacggcacgccaactgcaggtccgccggggcaaccactttcccatgtgtgacgacccagacctggtggccggggcactcacgtctttcgtgcaacggtcaacgtgagccgccgactgccgtcacacctggtacaccttgcggtttgccgccgcgccgccacatgccaagctactcgccatggccgtcgctattgcccgtccgaaattggaaggaaacatcgccgtcggcgaggaccgccggatcggcttcgccgagttcggc

SEQ ID NO: 575 - DNA, 401 bp, Mycobacterium tuberculosis H37Rv
cgaccgtgttgaacaacttgcgacacaccgcaatttgcgaaatccgccaccgaccgggcatagtaacccagctagtcgtcgttgtcgcgtcgaaccacatggtgaactgtgcggcgggtgcattttgcacatcaagtgggcgctgattgggaagatttacccttcggcggcggcggtaggtgcagattgcactttggctcatgctgattgaaattttttgacctgttgcggtccttgcgggctcgccatcattggcggcagttcgtcaccgacgaatcggggccaaggacgtaggcgaccagttcgcttgactgctaaccgctcctgatcgtacccgtgcgagtgctcgggccgtttgaggatggagtgcacgtgtctttcgtgatggcatacccagagat

SEQ ID NO: 576 - DNA, 401 bp, Mycobacterium tuberculosis H37Rv
gttcgaggaggcgccggagatgaccagcgcgggtgggctcctcgagcaggccgccgcggtcgaggaggcctccgacaccgccgcggcgaaccagttgatgaacaatgtgccccaggcgctgcaacagctggcccagcccacgcagggcaccacgccttcttccaagctgggtggcctgtggaagacggtctcgccgcatcggtcgccgatcagcaacatggtgtcgatggccaacaaccacatgtcgatgaccaactcgggtgtgtcgatgaccaacaccttgagctcgatgttgaagggctttgctccggcggcggccgcccaggccgtgcaaaccgcggcgcaaaacggggtccgggcgatgagctcgctgggcagctcgctgggttcttcgggtctgg

SEQ ID NO: 577 - DNA, 401 bp, Mycobacterium tuberculosis H37Rv
tcgagcaggccgccgcggtcgaggaggcctccgacaccgccgcggcgaaccagttgatgaacaatgtgccccaggcgctgcaacagctggcccagcccacgcagggcaccacgccttcttccaagctgggtggcctgtggaagacggtctcgccgcatcggtcgccgatcagcaacatggtgtcgatggccaacaaccacatgtcgatgaccaactcgggtgtgtcgatgaccaacaccttgagctcgatgttgaagggctttgctccggcggcggccgcccaggccgtgcaaaccgcggcgcaaaacggggtccgggcgatgagctcgctgggcagctcgctgggttcttcgggtctgggcggtggggtggccgccaacttgggtcgggcggcctcggtc

SEQ ID NO: 578 - DNA, 401 bp, Mycobacterium tuberculosis H37Rv
ctgcaacagctggcccagcccacgcagggcaccacgccttcttccaagctgggtggcctgtggaagacggtctcgccgcatcggtcgccgatcagcaacatggtgtcgatggccaacaaccacatgtcgatgaccaactcgggtgtgtcgatgaccaacaccttgagctcgatgttgaagggctttgctccggcggcggccgcccaggccgtgcaaaccgcggcgcaaaacggggtccgggcgatgagctcgctgggcagctcgctgggttcttcgggtctgggcggtggggtggccgccaacttgggtcgggcggcctcggtcggttcgttgtcggtgccgcaggcctgggccgcggccaaccaggcagtcaccccggcggcgcgggcgctgccgctgac

SEQ ID NO: 579 - DNA, 401 bp, Mycobacterium tuberculosis H37Rv
cgccagggccggtggtgggctcagtggtgtgctgcgtgttccgccgcgaccctatgtgatgccgcattctccggcggccggctaggagagggggcgcagactgtcgttatttgaccagtgatcggcggtctcggtgtttccgcggccggctatgacaacagtcaatgtgcatgacaagttacaggtattaggtccaggttcaacaaggagacaggcaacatggcctcacgttttatgacggatccgcacgcgatgcgggacatggcgggccgttttgaggtgcacgcccagacggtggaggacgaggctcgccggatgtgggcgtccgcgcaaaacatttccggtgcgggctggagtggcatggccgaggcgacctcgctagacaccatggcccagatgaa

SEQ ID NO: 580 - DNA, 401 bp, Mycobacterium tuberculosis H37Rv
tgtgctgcgtgttccgccgcgaccctatgtgatgccgcattctccggcggccggctaggagagggggcgcagactgtcgttatttgaccagtgatcggcggtctcggtgtttccgcggccggctatgacaacagtcaatgtgcatgacaagttacaggtattaggtccaggttcaacaaggagacaggcaacatggcctcacgttttatgacggatccgcacgcgatgcgggacatggcgggccgttttgaggtgcacgcccagacggtggaggacgaggctcgccggatgtgggcgtccgcgcaaaacatttccggtgcgggctggagtggcatggccgaggcgacctcgctagacaccatggcccagatgaatcaggcgtttcgcaacatcgtgaacat

SEQ ID NO: 581 - DNA, 401 bp, Mycobacterium tuberculosis H37Rv
tccgcggccggctatgacaacagtcaatgtgcatgacaagttacaggtattaggtccaggttcaacaaggagacaggcaacatggcctcacgttttatgacggatccgcacgcgatgcgggacatggcgggccgttttgaggtgcacgcccagacggtggaggacgaggctcgccggatgtgggcgtccgcgcaaaacatttccggtgcgggctggagtggcatggccgaggcgacctcgctagacaccatggcccagatgaatcaggcgtttcgcaacatcgtgaacatgctgcacggggtgcgtgacgggctggttcgcgacgccaacaactacgagcagcaagagcaggcctcccagcagatcctcagcagctaacgtcagccgctgcagcacaatac

SEQ ID NO: 582 - DNA, 401 bp, Mycobacterium tuberculosis H37Rv
gcggccggctatgacaacagtcaatgtgcatgacaagttacaggtattaggtccaggttcaacaaggagacaggcaacatggcctcacgttttatgacggatccgcacgcgatgcgggacatggcgggccgttttgaggtgcacgcccagacggtggaggacgaggctcgccggatgtgggcgtccgcgcaaaacatttccggtgcgggctggagtggcatggccgaggcgacctcgctagacaccatggcccagatgaatcaggcgtttcgcaacatcgtgaacatgctgcacggggtgcgtgacgggctggttcgcgacgccaacaactacgagcagcaagagcaggcctcccagcagatcctcagcagctaacgtcagccgctgcagcacaatacttt

SEQ ID NO: 583 - DNA, 401 bp, Mycobacterium tuberculosis H37Rv
gccggctatgacaacagtcaatgtgcatgacaagttacaggtattaggtccaggttcaacaaggagacaggcaacatggcctcacgttttatgacggatccgcacgcgatgcgggacatggcgggccgttttgaggtgcacgcccagacggtggaggacgaggctcgccggatgtgggcgtccgcgcaaaacatttccggtgcgggctggagtggcatggccgaggcgacctcgctagacaccatggcccagatgaatcaggcgtttcgcaacatcgtgaacatgctgcacggggtgcgtgacgggctggttcgcgacgccaacaactacgagcagcaagagcaggcctcccagcagatcctcagcagctaacgtcagccgctgcagcacaatacttttac

SEQ ID NO: 584 - DNA, 401 bp, Mycobacterium tuberculosis H37Rv
ggtccaggttcaacaaggagacaggcaacatggcctcacgttttatgacggatccgcacgcgatgcgggacatggcgggccgttttgaggtgcacgcccagacggtggaggacgaggctcgccggatgtgggcgtccgcgcaaaacatttccggtgcgggctggagtggcatggccgaggcgacctcgctagacaccatggcccagatgaatcaggcgtttcgcaacatcgtgaacatgctgcacggggtgcgtgacgggctggttcgcgacgccaacaactacgagcagcaagagcaggcctcccagcagatcctcagcagctaacgtcagccgctgcagcacaatacttttacaagcgaaggagaacaggttcgatgaccatcaactatcaattcgggg

SEQ ID NO: 585 - DNA, 401 bp, Mycobacterium tuberculosis H37Rv
atcaggcgtttcgcaacatcgtgaacatgctgcacggggtgcgtgacgggctggttcgcgacgccaacaactacgagcagcaagagcaggcctcccagcagatcctcagcagctaacgtcagccgctgcagcacaatacttttacaagcgaaggagaacaggttcgatgaccatcaactatcaattcggggatgtcgacgctcacggcgccatgatccgcgctcaggccgggttgctggaggccgagcatcaggccatcattcgtgatgtgttgaccgcgagtgacttttggggcggcgccggttcggcggcctgccaggggttcattacccagttgggccgtaacttccaggtgatctacgagcaggccaacgcccacgggcagaaggtgcaggctgccg

SEQ ID NO: 586 - DNA, 401 bp, Mycobacterium tuberculosis H37Rv
accatcaactatcaattcggggatgtcgacgctcacggcgccatgatccgcgctcaggccgggttgctggaggccgagcatcaggccatcattcgtgatgtgttgaccgcgagtgacttttggggcggcgccggttcggcggcctgccaggggttcattacccagttgggccgtaacttccaggtgatctacgagcaggccaacgcccacgggcagaaggtgcaggctgccggcaacaacatggcgcaaaccgacagcgccgtcggctccagctgggcctgacaccaggccaaggccagggacgtggtgtacgagtgaaggttcctcgcgtgatccttcgggtggcagtctaggtggtcagtgctggggtgttggtggtttgctgcttggcgggttcttcg

SEQ ID NO: 587 - DNA, 401 bp, Mycobacterium tuberculosis H37Rv
caggtcgccaccacgctggtcagtgcgcgttcagctcgcttgcggcgctgcagcagccagtccgggaaatagctgccctggcgcagcttggggatcgcgacgtcgatggttgcggcacgggtgtcgaaatcacggtggcggtagccgttgcgctgattggaccgctcatcgctgcgttcgcggtagcccgccccgcacagggcgtcggcttcagcccccatcaaggcggcgatgaacgtcgagagcagcccgcgcagcagatccgggctcgcctgtgcgagttggtcagccagaagctgctcggtgtcgataagatgagaagaggtcattgcgtcatttccttcgattgacttttgctggtcgtttcgaaggatcacgcgatgaccgcccactactgggct

SEQ ID NO: 588 - DNA, 401 bp, Mycobacterium tuberculosis H37Rv
tcgcccaccaccacacccgccgagatgcggccttccaccatcgaggcgcccagggtgccggcgttgtagttgacgaagccctcatgcatcacggtggtgcccggcgccaggtgagcgcccaaccgcacgcggtcggcatcggcgatacgtacgccggtgggcacgacgtagtcgaccatccggggaaacttgtcgacgccatacacagtcaccggtccgcggcggcgcagccgcgcccgcaccgcctcgaaaccgtctatggcgcagggtccgtgattggtccacaccacattggtcagcaccccaaacaagccgccggcgttcaacccatggggcgccaccaggcggtgcgacaagaggtgaagccgcaggtaagcatcgtatgggtcagcggcgacatc

SEQ ID NO: 589 - DNA, 401 bp, Mycobacterium tuberculosis H37Rv
gccggcgcgacgtcgcctgccagcagcagcgacgtgatctgagccaggcccacggtgaaccgcagcagccccggatgttcggcggccgacgcccgttcggccagccggtcaacgtcgccgaaccggcccattcgtgccgatgataacgcggcagcgctggcggcccaggccacggccatgtcgtcggcagccggtccggacagcacctcggtggccagcgtgatggcccgcggcaagtttccggagttcatcgcaaacgtggccgccagcgcatccagggtgctgcgggccgtgggctcggtcactcggctgcgggtcgtctgcagaaacgccgtggcgcgctcgggctcgttgagcatccagaaccgattcgccgcccggggtatcgcccaggccatcag

SEQ ID NO: 590 - DNA, 401 bp, Mycobacterium tuberculosis H37Rv
gttcaagagtcgcaaggtggagttgcgcaaccaggcctatggcgccgacatcgaggatccgctgtacgtactggccggcccggacgaaggatatgtgccgtactacgccgaataccctgaggaggtttcgctcggaaggcgaccgcagggctagcggattccgggcgcagtctcgatacccgcactggacgctcgacggtaaccaggcactatggatgcgtgcgttcaacaccgccggcctcagccggtcgttcaacaccgccggcgttagccggccattcaacaccgccggcgttagccggccattcaacgctgtgcggccgtccagtcgcaggtgatcgtgcgctgatcatggcgatcgtcaaccgcaccccggattcgttttacgacaagggtgcgac

SEQ ID NO: 591 - DNA, 401 bp, Mycobacterium tuberculosis H37Rv
gttccggatgacgtgcaccaggttcggatccaggctgggatagacccgcaacatgtcgttgcgcattgcagaactgaccgcaatgaccgcgttggcggccagcaccgcggtctgctcgacccatgtcgatacctggtagccgccgccgagttgctccttcttccatggccgcaacggttcgagcgaatgtgcggtcaaaacatgcgggatgtcgtagagtatcgcggccagatgccccgccagagcggtgtaccaggtgtgtgaatgcacgacggtggccgcgctggcggcattggccatcaccaggtccgcggacaaggtggacagcgccgcgttggcgctgcctagcctcgggtcgggccgataggcaaatgcgcccgggcggggtgcgcccatgcagt

SEQ ID NO: 592 - DNA, 401 bp, Mycobacterium tuberculosis H37Rv
tcgaacggggccaaacaccttgacggacagcccgtcagagcagtagccaggggcggattccccttggcagtggtttgcgggggccgataggtttgagccatgagagaagtgccgcacgtgctgggcatagtcttagccggcggtgagggcaagcggctttatccgctgaccgcggaccgggccaagcccgcggttcctttcggcggcgcctatcgattgatcgatttcgtactctcaaacctcgtcaacgcccggtatctgaggatctgtgttctcacccaatacaagtcgcattcactggaccgccatatctcgcagaactggcggttgtctggtctggcgggtgagtacatcaccccggtgccggcacagcagcgcctcggcccgcgctggtataccgg

SEQ ID NO: 593 - DNA, 401 bp, Mycobacterium tuberculosis H37Rv
acgtcgcaccccgcgcgaccacagccgggtgaaccctgactcccggatgccgccgggaaaggccaagtcgcggtaggcgtcggtgaaaccctcccacgggcagatcgcccgcagcgccggcggttgcagcgcggccacggcgtactggctaatggccagataagacacccccagcatgacgacgcgcccatcactccatgcctggtcggcgagccatcccaccaggtcgtaggtgtcctcggcttcctggtgtgacagcaggtctccggtaccgtcggagcggccgcagccgcgcgaatccgcattgaccacgacgaagccctgcgcggtccaccacgccgggtccggcgcctcccagccggtcagcgccgagaaggtcagcggcttcggctggcgcagca

SEQ ID NO: 594 - DNA, 401 bp, Mycobacterium tuberculosis H37Rv
gcgggtgaatcgggcgctcggcgacagctgcgcggccaccgcggccaccgccgtgaagaccatcccggaggccgccagcgccacgccaaacgctaccgacccggccggagccacatcggtggcaagcagacccaatgcaccgatcgcgccggtcgcgatcgacgcaccgaacgacagcagcagcgcgccggtgaggttggcgtagcgcccgaccacggtcgaatcgatcaattcggcacggccgctttcctcgtccgcgcgggtgtgccgaatcaccgtgaggatgaccgccaccgcgatgagggtgtgaaacatcccggctttccagattccgaccgcacccaggctgtcgttgtagaccggcccgtagagcgcgcgctgtgccgggctggccataatgg

SEQ ID NO: 595 - DNA, 401 bp, Mycobacterium tuberculosis H37Rv
atgcccaggaaccggccggccggttcaccaaggtggcggccgccgtggccgattcggtggtgaccattgagtcggtcagcgaccaggagggcatgcaaggttccggcgtcatcgtcgatggccgcggctacatcgtcaccaacaatcacgtgatctctgaggcggccaacaatcccagccagttcaagacgaccgtggtgttcaacgacggcaaggaggtgcccgccaatctggtgggtcgtgaccccaagaccgacttggccgtcctcaaggtcgacaacgtcgacaatctgaccgtggcccggctcggtgattccagcaaggtacgggtcggtgacgaagtcctcgcggtcggcgcgcccctggggctgcgcagtacggtgacccagggcattgtcagc

SEQ ID NO: 596 - DNA, 401 bp, Mycobacterium tuberculosis H37Rv
cgacgcctcgatcaaccacggtaactccggcggtccgctaatcgacatggatgcccaggtgattggcatcaacaccgccggtaagtcactgtcggatagcgccagcgggctgggctttgcgatcccggtcaacgagatgaaattggtggcaaattctctgatcaaagacggaaagatcgtgcatccgacgttgggcatcagcacccggtcagtaagcaacgcgatcgcgtcgggcgcgcaggtggccaatgtaaaggcgggaagtcccgcgcagaagggcgggatcttggagaacgatgtgatcgtcaaggtcggtaaccgcgcggtcgccgactccgacgagttcgtcgtcgccgtgcgccagttggctatcggccaggacgctccgatagaggtggtcc

SEQ ID NO: 597 - DNA, 401 bp, Mycobacterium tuberculosis H37Rv
gggcgggatcttggagaacgatgtgatcgtcaaggtcggtaaccgcgcggtcgccgactccgacgagttcgtcgtcgccgtgcgccagttggctatcggccaggacgctccgatagaggtggtccgcgagggtcggcatgtgacgctgacggtgaaaccggaccccgatagcacctagagtgttcgccaacatcggttggtgggaaatgctcgtcctcgtcatggtcgggctggtggtgcttggcccggagcggctcccgggtgccatccgctgggcggcaagcgctctgcggcaggcgcgcgactatctcagcggtgtgaccagccagctacgtgaggacattggacccgaattcgatgatctgcggggacatctcggtgagctgcagaagctacgggga

SEQ ID NO: 598 - DNA, 401 bp, Mycobacterium tuberculosis H37Rv
acatcgacaccagcgcggaaaaaccccagtgagcatcgcgctgacgtcgatctcgacggtgaggttcatcctggctcaggatccctcaagatccgtggcgcaaccacacactgtcggccacccagggcgacgcggcgccggccaccgaccacgccagctccgcgggcacatcgagcacctgataacccttgcggcccgccacggtggccgccacgagcgtcgccacccccgccctccgctggaacagtgtctggcgcaccgtccagccgatgatgccggtgcaggcgatgcaatcgcggcgacgctgtaggctgccggcgcgcgcaaccaaccagccgtcggcgacgcggtgcccgagtgatcggacccgatcgacggccagcccagcgcaacccgcggtc

SEQ ID NO: 599 - DNA, 401 bp, Mycobacterium tuberculosis H37Rv
ggaacgttcaactcggatatgggtgggggcaccgagttcttcttgacgtggtcgctgacgatgcgtaactgacgatcacaacgtgcccaccaaaaacagagtagacaacagtcgacaattcccttgtactccggcgctatgaagtcgatctccgtcggtgagctgcgccagaatcccgctcccatgatcgccgacctcgaacggggtgagccatacgcgctgacccgccacaaccaccggatcggaacgatcattcctgccgtctcgtcggcaacactcattccccggaaagcctagtacgccgagcagacgcaacggcacccaatttcgaccagaatcgggttcttttgcgtctgctcacgcggtcaacgctagcgtcgtgtcgggtccaaccccagcga

SEQ ID NO: 600 - DNA, 401 bp, Mycobacterium tuberculosis H37Rv
ggtgccgcgcgcgtcggtggcgccgccgtttgcgtgcatcgactcgatgcgcccaatcccggccagcaagttccaactgacgccacagccaggggcggcagcggccatcttcagctcggcgttgcggtaggcggacagtgccatggccggaatgccaagcgcaccaggcgaattcacgatcatcggtggtggtggagccgatatggtagctaccgccacgcggaagctggtcggcgggcgcttcatggcgatgacgaccggaccggacaggtctatgccggacgcggcgaccgcggccaccggggtgataacggcgtgcaccggcgcggttctcccggggaataccggagccgcgctgccgaccgcactggcgaataccaacggggcaatcgctgccacgc

SEQ ID NO: 601 - DNA, 401 bp, Mycobacterium tuberculosis H37Rv
cgagcgccatggtgttcatgccgggctgcgatgggccgtagccgtctaggtagcccggctccgggtagtagccgcccggagatccaccgtatggcggaggcatgggcgggtatggtatgtcgccgtagcctgctgaagaagtgccggggggtggatatccgggcggcgcatagcccccgggtggcatcggcggtggatagccggtcggatacccgggctggtaagcaggcgggtaaccggacggcggatacgccgggggcgggtggttggccatcggcgaagatgccggcggcgcccaaggagcgtcagcaatgggctgttcggggggccgctcaccgaccggaggcggtccacccgcggcgtcgtgcgcactctcgccagaggagccgctgggagccgtc

SEQ ID NO: 602 - DNA, 401 bp, Mycobacterium tuberculosis H37Rv
gtagccgcccggagatccaccgtatggcggaggcatgggcgggtatggtatgtcgccgtagcctgctgaagaagtgccggggggtggatatccgggcggcgcatagcccccgggtggcatcggcggtggatagccggtcggatacccgggctggtaagcaggcgggtaaccggacggcggatacgccgggggcgggtggttggccatcggcgaagatgccggcggcgcccaaggagcgtcagcaatgggctgttcggggggccgctcaccgaccggaggcggtccacccgcggcgtcgtgcgcactctcgccagaggagccgctgggagccgtcatggtgatcaacctatcccggcaacgatgctcgccgttcggtgggcctcggtcgctcgcgggttgag

SEQ ID NO: 603 - DNA, 401 bp, Mycobacterium tuberculosis H37Rv
gcgctgaaaaaggggggcggaggagaatgagaaccgatgactagcccattccagcccagacaggttcccggttcaacacccgccgccgcaggtgcgggtcgacgtggtgtgcccgcattgcccaccccgccgaaaggttggccagtcgggtcgtatcccacctatgccgaggcgcaacgtgcggtcgactatctatccgaacagcagttcccggtccagcaggtgaccatcgttggcgtggacctcatgcaggttgaacgggtcacaggccggctgacctggcccaaagtgcttggtggcggcgtgctgagtggcgcctggctgggcctgttcatcgggttggtgctcgggttcttcagtcccaatccatggtccgcgctggttaccggcctggtggccgg

SEQ ID NO: 604 - DNA, 401 bp, Mycobacterium tuberculosis H37Rv
cttctttcgaaatgaggtctttgctctcggtctgcatgcgctggaatgcggtcgatagcggattcacgcaccggcgcaactcgaccacttcccgcttgagcagatagatcggttcgatgtcgagcttgcggcccggcgcgaacgctacttcctcgatgctgtcgatatcggtctccatgagattggtcacctcgaggtagtggtcgaccacgtagtcggcgatcgcgtgcatcaccgcatacggtcccaaccgcaaatgttcggggtcggcatccatccgcttacgcacctcggataacccgccgtgttcgccgtggcggacggtgaccacgaaatccttgccgacgaagatcatgatctcgccggttttgacgatctcgcgggccagtaccaccgattcg

SEQ ID NO: 605 - DNA, 401 bp, Mycobacterium tuberculosis H37Rv
aagcgtgtcccgttgcttgacggtgcattgcgtgtttgcctggatccccgcgccgacggtgtggatcgggcccagtaccctcaagcccgtgccaactgcatctgtcgcggtgactatcggctcagacacttcggtgtgagaatcaccaggatcctcgcgctgctgcttgccgtcctgcttgcagtgtctggcgtggctggctgctcggccgacaccggcgatcgccacccggagttggtggtcggatccacgccggactccgaggcgatgctgctggccgccatctacgtcgcggcgctgcggtcgtacggttttgcggcgcacgccgaaaccgccgccgacccggtggcgaaactggactcgggcgcgttcaccgtcgtacccgctttcaccggtcagat

SEQ ID NO: 606 - DNA, 401 bp, Mycobacterium tuberculosis H37Rv
ggctgcccgccccgcgtgagtttcggaatgacgcaacaatgttcgccgcgctgcgggccggacagctggtcgcggcctggaccaccaccgccgaccccgacatccccgcggacctgatcatgctgaccgacggcaagcccgcgctgatccgggccgagaacatcgttccgctgtatcgtcgcaacgcgctgaccgagcggcaactgctggccgtcaacgaggtcgccggcgtgctggacaccacggccctgatcgggatgcgccgccaggtggccgcgggggccgacccggcggcggtggccgccggctggctcgccgaacacccgctgggacgttgagccgccacgagcgtccgggtcgacgcgatgacacaccgcgtcggccgaacaaccttcgggcgc

SEQ ID NO: 607 - DNA, 401 bp, Mycobacterium tuberculosis H37Rv
aggtggaagtagttcgacggagtcgacggcatcgcgatggtcatcgaaccttccgcccacaactgcaagaagcgttcgatccgggcagaagtgtggtcgggtccctgcccctcgtgcccgtgcggtaacagcagcacgacgttggacaattggccccacttggcctcaccggagctgatgaactcgtcgatgatcgactgcgcgccgttgacgaagtcgccgaactgcgcctcccagagcaccacggcgtccggattgcccacagtgtagccgtactcgaagccgacggcggcgtactccgacagtggcgagtcgtagaccaggaactttccgccggtcgggctgccgtcggagttggtcgccagcagctgcagtggtgtgaactcctcgccagtgtggcg

SEQ ID NO: 608 - DNA, 401 bp, Mycobacterium tuberculosis H37Rv
catctggtcggactcgaccgactcgctcggctgcacaccgtgcttctccagctcgcgcacttcgttgaacacccgttccagctggccctggtagtcgcgcagcgcgtcctcggcctccttcatcgagatgtcgccacgtccgatcagggcttcggtgtagcttttgcgggccccgcgcttggtgtcgacgacgtcgtacacgtaggggttggtcatcgacgggtcgtcaccctcgttgtgcccgcggcggcggtagcacagcatgtcgatgacgacgtccttcttgaaccgttgtcggaagtccaccgccaaccgcgccacccagacacacgcctccgggtcgtcgccgttgacgtgaaagatcggtgccccgatcatctttgcgacgtcggtgcagtact

SEQ ID NO: 609 - DNA, 401 bp, Mycobacterium tuberculosis H37Rv
cgttgcccgcggccgcggtgtcggccggcttggggggtgcctgcggggcggccgcagcggcccgctcggcaacgagtggcgaggtaacccgggttggttcggcagctggttgggaggtgggttcggggctgtagtcaaccaggaactcgtgccagctgggatcgaccgaggaggggtcgtcgcggaacttgcggtacatctcttcgaccagccattcgttttgcccgaatggtgaacttatgttggccacggccgctgttcgcctcgattcttctgctagttgaagtcctgcaagcgcattgcgcggcgcctgctggcagtcggtgaacggtctgccccataaaggctaacgctttgccagcgattcgccagagagaccgggcaacgcgcgctagctggca

SEQ ID NO: 610 - DNA, 401 bp, Mycobacterium tuberculosis H37Rv
atcggccaccgcagtagtgttgtcgccgaccagcaccgccaagaccagggcacggcgccgttctcggtggtcgaggggaatggcgtgtaccgaggccagcgccagcacgaacagcgcggtggcctcaaggaacacgacaacctctccggccgcggcgaaccatgcggccagggtgccgatccccggtaaggtcgcggccgcacctaccgccgctccactggccgtcaccaccgacaagaagcgtttctcgagcttggctacgatcttggcggggctggcccccgggtgggcgcgacgcaggcgggccacatacgcctgtgctgccgggccctgtatccgcgaactccgttcgatgacctgcgccaatgcccgcgtggacactttgggccgcccgccggtcc

SEQ ID NO: 611 - DNA, 401 bp, Mycobacterium tuberculosis H37Rv
tgtctggtgcgggaatgtttctgattgtcttcggactacagcagggccagtccgccaattggcagccttggatttgggcggtgatcgtcggcggtatcgggtttatgtcgctgttcgtttactggcaggcgcggaacgcccgcgagccgctgatcccactggaggtcttcaacgaccggaacttcagcttgtccaacctcaggatagcgatcatcgccttcgcggggacggggatgatgctgccggtgacgttttatgcgcaggcggtgtgtgggttgtcgccgacccacacggccgtgctgttcgcgccgacggcgatcgtcggtggcgtgctggccccgttcgtcggcatgatcattgacaggtcccatccgttgtgcgtactgggtttcggcttctcg

SEQ ID NO: 612 - DNA, 401 bp, Mycobacterium tuberculosis H37Rv
actgggtcactgctgcggggcaatgcggcgccgctgcgcgtgcgaggagggcgacgcagcagcacgtccattagcgcggtgctgggcagttgcggcgatccggaagccacggcagcggccgtcgattcgatcgattcccgcagggccgtcgtcggcaccggcggcccgggagcgagcgcgaacgggagctgctgaaatgtattgccgtcactgccggttcgttcgacgatgaccacctcggtgggcacagtggggtcgtcggtctcaaccactgcggcggggcccgcggctcggcgatcaggattgtcggtcatgcccggcggcgccgggggttcgtagagggcaaacacattcccgttgaggtccccacgtgccagttcaccggtaagccggacccgccg

SEQ ID NO: 613 - DNA, 401 bp, Mycobacterium tuberculosis H37Rv
acatcaccagcaaggtgccccaggcgctggtgctggtgcccacccgggagctggctctgcaggtggccgaggcgttcggccgctacggtgcctatctgtcgcaactcaacgtgctgccgatctacggcggatcgtcgtatgccgtgcaactggccggattgagacgcggcgcgcaggtggtggttggcacccccggtcgtatgatagaccatctcgaacgggcgaccttggacctgtcgcgggtggactttctagtgctcgatgaggccgatgagatgctgaccatgggtttcgccgacgacgttgagcgcattctgtccgagacccccgaatacaagcaggtcgccctgttttccgcgaccatgccgccggcgatccgcaaactcagcgccaagtatctg

SEQ ID NO: 614 - DNA, 401 bp, Mycobacterium tuberculosis H37Rv
tcggtagatcgcgtcgtgcagcctgagcagctgcacgcctacgtggcgctcaagccatcgggaaatgtccatggggtcagtcttgcgcagcggcatcctgttgcgccagcgcctcccgcaggatccgtccggtggcttcccggtccgggtcgcggcgcagcatcattcccttggcgaccgacagcttgtcgccgttgcgcggcggtaatacgtgcaagtgaacgtggaacaccgtctgaaaagcggcacggccgtcgttgatggcgatgtgtgtcgcgtcagccaacttcgtggcgcgggccgcccgcgcgatgcgttggccgatggcgaccatgtcagccaacgcctccggcggggtgtcggtgaggtcaacggtgtgtcgcttgggcagcaccagcgtg

SEQ ID NO: 615 - DNA, 401 bp, Mycobacterium tuberculosis H37Rv
gcttgtcacacgccgccgaggccatgcgctacaccgcgctggaggccattatgcggccgggggctaccgagttggacatcgcgaaggggtcgcaggcgctggtgagccagatcgtgccgctgctggggccgatgatccaggacatgctgttcatgcagctgcggcacatgatggagacggaggccgtcaacgccggagagcgtgcggccggcaagccgctaccgggagcgcgacaggtcaccgttgccttcgccgacctggtcggtttcacccagctaggcgaagtggtgtcggccgaagagctagggcacctcgccgggcggctggccggcctcgcgcgtgacctgaccgctccgccggtgtggttcattaagacgatcggcgacgcggtcatgttggtc

SEQ ID NO: 616 - DNA, 401 bp, Mycobacterium tuberculosis H37Rv
tacaccggatcctggctggtatacagcgcgccctggcagtccggcagggacaccgtcaccggcgaagagtccatcgatgtgatcggtttgcccggctgcatggacgacgagcccatcacggcgttgacttctgaggagttcagcagtagggcgctaaggcgctcctccgcaaccggctgaggcggctgtaccggcttgggccggatggcgatccagatgccgatggcgcccaacacgaggacgagcacgacggcggcggcgccggccactaagggccacgggttggttttgcgcggggtctgggcccaggggctggggccgccggacggcggtgcgccccagccgccgccctggtagtactgcggggtgggagtgggtccgctggccggcatcgggccgct

SEQ ID NO: 617 - DNA, 401 bp, Mycobacterium tuberculosis H37Rv
ccggatcctggctggtatacagcgcgccctggcagtccggcagggacaccgtcaccggcgaagagtccatcgatgtgatcggtttgcccggctgcatggacgacgagcccatcacggcgttgacttctgaggagttcagcagtagggcgctaaggcgctcctccgcaaccggctgaggcggctgtaccggcttgggccggatggcgatccagatgccgatggcgcccaacacgaggacgagcacgacggcggcggcgccggccactaagggccacgggttggttttgcgcggggtctgggcccaggggctggggccgccggacggcggtgcgccccagccgccgccctggtagtactgcggggtgggagtgggtccgctggccggcatcgggccgctattg

SEQ ID NO: 618 - DNA, 401 bp, Mycobacterium tuberculosis H37Rv
ggctgcatggacgacgagcccatcacggcgttgacttctgaggagttcagcagtagggcgctaaggcgctcctccgcaaccggctgaggcggctgtaccggcttgggccggatggcgatccagatgccgatggcgcccaacacgaggacgagcacgacggcggcggcgccggccactaagggccacgggttggttttgcgcggggtctgggcccaggggctggggccgccggacggcggtgcgccccagccgccgccctggtagtactgcggggtgggagtgggtccgctggccggcatcgggccgctattgggcgcccaggacggctggccggtggggccaggccgctgtccggcaggccccggctgggccgggggcgtgtaggacggctttggtgccgg

SEQ ID NO: 619 - DNA, 401 bp, Mycobacterium tuberculosis H37Rv
ggagccatggcggtggccggcatggtcggaggcgggacgggcttaggcggcgcgggcagggtggattcttggctgcggcgcaggatgtcggcggcgtggtcttggtcggggtcgctgagcgcttcgtgggcggccagggccaggtcgccggcgctggcgtagcggtcttcgggctttttggccatgccgcgggcgaccaccgcgtcaaaggctttggggatgcccgggcggatggcgctgggctgggggatgggtcccatcaggtgggagctgaccagtgtgccggcgctgtcggcgcgatacggcggggccccggtcaagcattcgtgcagcacgcaggccagcgcgtagatgtcggcgcggtaggttacctcgtcgttggagaaccgttcgggggccat

SEQ ID NO: 620 - DNA, 401 bp, Mycobacterium tuberculosis H37Rv
tcctccgtggcttgcggtgccaaggtgccaatagggtgtcgctaccggtcattgtgataccacgtttcgccgatgcggtaagaacccaggatctcggcacgccgtgcgatgtaccgggtcggtggcccttgacagcggcatcggctgtttccatgcgggtgaaatgctggccctgtaaagatgatcgtgaatgtcccacgggaatcctgttggtgctcatccaaacatgcgatcggcgggcagccgacccggtgttcttgcaacgagtggctgcccgctgtggtgatcgacattcgagcgcggttcaggtggtgacggccatgaagtcgtggctggtggcccacgcctcgacgaaggtttccatcgggatctgctcgtcgcggcccgtgggggtaccgctg

SEQ ID NO: 621 - DNA, 401 bp, Mycobacterium tuberculosis H37Rv
caccgttttgacgtcttcggaggtcagacgtgagccggccagcgtcgcgatgtcgtcagcagacgagttcccggtgatcttggtggtcgcgacaccgtccgcctgctggctgccggcaaccgacgcgtccttgaggttagccaacaggttggccaggcccttgttggggtcgaggagcaccgacacgttgtagatcgaggcgccgttgccgaaatcggtgtaggtgccgggctggcctaggtcggagtacaggtgaccgtcaacatagacgaacttcgcgtcttcgctcttgttgccgacgagcaatgtcgcgctaccggtggcaaccgtctgcggtgtgttggagatatcgccttcgagcttggtcacccgcaggtttggcacgtcgcctgtcaccgcaa

SEQ ID NO: 622 - DNA, 401 bp, Mycobacterium tuberculosis H37Rv
atgatcggtgcggtgaccagcacggtggcggtcatctggaccaggaacaggatctgccggacgtcgttggtgctgcgggtcaacaacgtcggagcgccgaatcgggcggtctcgcgttccgagaaggtgatgatgtgttcgaacattgccgagcgcaggtcacggccgaaacccgccccggtccgggagcccagatagaccgccccgatcgcgcacagcacctgcaatccggtcaccccaagcatcaccgcacccagccgtacgatggtggcggtgtcgcccttggcgacgccgtcgtcgacgattgcggcgttgaccgtcgggaggtatagcgaagccagggtgctgaccagctgcagcatcatcagcatcgcgaccagccggcggtacggtcggatgtg

SEQ ID NO: 623 - DNA, 401 bp, Mycobacterium tuberculosis H37Rv
cggcagcccgatcgggcgggaacgcaagaccgaggagttgtcgcgcgcgagtgtcgaggacatcaacatcgacggccacagcggtttcatcgccatcggtaacgagcccagtttgggtgactcactgtgtgaagtcggaatccagttctccgacgacttcatcgaatggtcggtgagtttcagccagaagccgttcccgctgccgtgcgacatcgccaaagaactgacccgccaatcgattgcgaattcgaaatgagacgtgtcctggtcggtgcggccgccttgatcaccgcactgcttgtcttgaccggctgcacgaagtcgatttcgggtaccgccgtcaaggcgggtggggccggtgtcccgcgcaacaataactcccaggagcgctaccccaacct

SEQ ID NO: 624 - DNA, 401 bp, Mycobacterium tuberculosis H37Rv
gatccagggcgtggactcgattgtgatgcggacgggcgatcccaacggcgcctgcggcgtcgccagcgacgcggcgggagtggtcggctggtgggtcaatccccaggctcctggtatcgacgcctgcgggcaggcgatcaagctgatggagctgacgctggcaaccaacgcctagcgctgggcgaggcgggagcgtgggcgtgagcgcgcgcagttgtacggcactaacggcgtgtcggggtacagacacgcgcgctcgcgggttcggctgccttcaaaaggaagtacgcggctgacggtttgcggagcaagagcacctctaccgtggcacgtgaaagccgaccagcgcggcacaccccggttcgacgtctgcccagtgtccggcgacgcgtagcacggcg

SEQ ID NO: 625 - DNA, 401 bp, Mycobacterium tuberculosis H37Rv
ccgtggcacgtgaaagccgaccagcgcggcacaccccggttcgacgtctgcccagtgtccggcgacgcgtagcacggcgatccccgacgtcgggaacttctccgagatgcgttccgcgacagcggcgtcggtgccgctgatgctggccaggacgatggcaagggccgacgtcgttggctcgtgcccgaccacaagcagtgtggtgacgttgtcgccaacccggttgatctcctcgatcactgttccgggtgccgcgccgtagagccgctcggcgtagcgagcgggtgcgtcgatgccggtgtgcgccaaggtctgccgggcgcgcgtagccgtggagcacagcacggcatcgacggccggcaggttggcgcgcagccagccaccggccagcccggcctccc

SEQ ID NO: 626 - DNA, 401 bp, Mycobacterium tuberculosis H37Rv
cgacctcggcatcggggggttcgccgccgcggccgtcgacgagctagtcgcgaccgcgcgcgggggtgacgacgagtccgccgtcgatgcccaggcggcgctggcactgttgctgcggctcgctgaccggggagcggcgtgaagctgcaccggctggccctgaccaattaccgcggcatcgcacaccgtgacgtcgaattccccgatcatggagtggtggtggtgtgcggcgccaacgagatcggcaagtcctccatggtcgaggcgctggacctgctgctcgagtacaaggaccgctcgacgaagaaggaagtcaagcaggtcaagccgaccaacgctgatgtcggctccgaggtcattgccgaaatcagcagcggcccttatcgtttcgtctaccgcaa

SEQ ID NO: 627 - DNA, 401 bp, Mycobacterium tuberculosis H37Rv
tgaaaactgggtaaccggttgttaaaattcaccgcggcgtcgatctgagtagcaaagtccacaccgcgatacccgaggaggcccgcgtgacggttaccgacgactacctggccaacaacgtggactacgcgagcggtttcaagggcccgctaccgatgccgccgagcaaacacatcgcaatcgtggcgtgcatggacgcccggctggacgtctaccgcatgctgggcatcaaggagggcgaggcacacgtcatccgcaacgccggatgcgtggtcaccgacgatgtgatccgttcactggccatcagccagcggctgctgggaacccgcgaaatcatcctgctgcaccacaccgactgtgggatgctgactttcaccgacgacgacttcaagcgcgccatc

SEQ ID NO: 628 - DNA, 401 bp, Mycobacterium tuberculosis H37Rv
caatctccgcgctgcacggcgacaacgtggtgaccaaatccgaccagacgccctggtacgagggaccgtcgctgctgtcgcatctcgaagacgtctacatcgccggtgaccgcaacatggtcgacgtgcgattcccggtccagtacgtcatccggccgcacaccctcgagcatcaagaccaccgcagctacgcgggcaccgtggccagtggggtaatgcgttcaggcgacgaagttgtcgtgctgccgatcggtaagaccacccggatcaccgcgatcgacggcccgaacggcccggtggcagaagcgtttccgccgatggcggtttcggtgcggctcgccgacgacatcgatatctcgcgtggtgacatgatcgctcgcacccacaaccagcccaggatc

SEQ ID NO: 629 - DNA, 401 bp, Mycobacterium tuberculosis H37Rv
gcagaagcgtttccgccgatggcggtttcggtgcggctcgccgacgacatcgatatctcgcgtggtgacatgatcgctcgcacccacaaccagcccaggatcacacaagaattcgacgcgaccgtgtgctggatggccgacaacgcggtgctagagcccggccgcgactacgttgtcaagcacaccacccgaaccgtccgcgcgaggatagccgggctggattaccggctcgatgtcaacaccctgcatcgcgacaagaccgcaacggcgttgaaactcaacgaactgggccgtgtttcgctgcgcacccaggtgccgttgctgcttgacgagtacacccgcaacgctagcaccggctcgttcatcctcattgaccccgacaccaacggaacggtggcggc

SEQ ID NO: 630 - DNA, 401 bp, Mycobacterium tuberculosis H37Rv
cccaggtgctagccgggcagagggagttccgcgaacgcctcagcaacgccggcatcccgcatgaatcgcacgaggtgcctggcggtcacgtcttccggcccgacatgttccgtctcgacctcgacggcatcgtcgcccggctgcgccccgcgagcatcggggcggccgcagaacgcgccgattagccgcaccacgtataccccgcgggcaggtggccgctggccgatagcctcatgtgtgtgagcgtgggcgagtcagttgcgcagtcgctgcaacagtgggatcgcaagctgtgggacgtggcgatgctccacgcgtgcaacgccgtcgacgagaccggcaggaagcgctatcccacgctgggcgtcggcactcgattccggacggcgctacgggattca

SEQ ID NO: 631 - DNA, 401 bp, Mycobacterium tuberculosis H37Rv
tacccgcccaagcgcttcctgggggccgcgcgcaacatcgaagagggcgggtcgctgaccatcatcgccactgcgatggtcgagaccgggtccactggtgacacggtcattttcgaggagttcaagggcaccggcaacgccgagctcaagctggaccgcaagatcgccgagcggcgggttttccctgcggtcgacgtgaacccttctggaacccgcaaggacgagctactgctgtcgcccgacgagttcgctattgtgcacaagctgcgccgcgtgctatcgggcctggattcccaccaggccatcgacctgctgatgtcgcagctgcgtaagacgaagaacaactacgaattccttgttcaggtgtccaagaccacgccagggtccatggacagcgactg

SEQ ID NO: 632 - DNA, 401 bp, Mycobacterium tuberculosis H37Rv
tcgctgcaatgggatcttggcgatgcccatggcaccgtgatgctgcgaatgccgctgcacccggtcgccatcgagttgttgcgtgaggtgggtccgatggcggtatccagcgccaacatctcgggccacccacccccggtcgacgccgaacaggcacgctctcaactcggcgaccacgtcgcggtctatctcgacgcgggtccatccgaacagcaggccggctccacgatcgtcgatctgaccggagccaccccacgcgtcctgcggccggggccggtcagcaccgagcggatcgccgaggtacttggtgtggacgcggccagcttgttcggctagccgccgaacgtgcacgcactgcgaagattcggccaattgttcgcagctgttgcacgttcggcgag

SEQ ID NO: 633 - DNA, 401 bp, Mycobacterium tuberculosis H37Rv
catcgagttgttgcgtgaggtgggtccgatggcggtatccagcgccaacatctcgggccacccacccccggtcgacgccgaacaggcacgctctcaactcggcgaccacgtcgcggtctatctcgacgcgggtccatccgaacagcaggccggctccacgatcgtcgatctgaccggagccaccccacgcgtcctgcggccggggccggtcagcaccgagcggatcgccgaggtacttggtgtggacgcggccagcttgttcggctagccgccgaacgtgcacgcactgcgaagattcggccaattgttcgcagctgttgcacgttcggcgagtgttcagctctcaggttggtgcagtacggtctcgaggtgtccagcgatgtggccggcgttgccggtgg

SEQ ID NO: 634 - DNA, 401 bp, Mycobacterium tuberculosis H37Rv
tgctttgctgtcgccgttcctgctggtggtggcggtcatgtttgtgccaatgctcgacctgctgctagcgatcgtccgtcgcacccgcgccggccgcagcgcgtttagcccggacaaaatgcacctgcatcaccggctgctgcagatcggtcattcccatcggcgcgtggtcctgatcatctacctgtgggtgggcatcgttgccttcggcgccgcgagctcgatcttctttaacccgcgcgacaccgcggcggtgatgctgggcgcgatcgtggtcgccggcgtcgcgacactgatccccctgttgcgccgcggcgacgactactacgacccggacctggactagcccggagccgagaactacgacaaggagtagtagtggtgtctaccttgtggtacgg

SEQ ID NO: 635 - DNA, 401 bp, Mycobacterium tuberculosis H37Rv
gtcgaaagcgccatcgggatgcggatcgcacccttcgtgctgccgctggcggtgaccatcttcgtgttcatcctgatctccaactggctggcagtcctcccggtgcagtacaccgataaacacgggcacaccaccgagttgctcaaatcggcagcagcggacatcaattacgtgctggcgctggcgcttttcgtgttcgtctgctaccacacggccggtatttggcggcgcggtattgtcggacacccgatcaagttgctgaaagggcacgtgacgctcctcgcgccgatcaaccttgtcgaagaagtcgccaagccaatctcgttgtcgctccgacttttcggcaacattttcgccggcggcattctggtcgcactgatcgcgctctttcccccctacat

SEQ ID NO: 636 - DNA, 401 bp, Mycobacterium tuberculosis H37Rv
aaggcgctggaagacgccaagtcggaagcgcaccgtgttgtggaagaggccaggacagatgccgaacgcatcgcagaacaactagaggcccaggccgacgtcgaggcggagcgcatcaaaatgcagggtgcccgtcaggtcgacctcatccgggcacagctgacccgtcagcttcgcctcgagctcggtcacgaatcggtgcgccaggcaagggaattggtacgcaatcacgtggccgatcaggcacaacaatcggccaccgtcgaccgcttcctggatcagctcgatgcgatggcgccggctacggccgatgtcgattacccactgctggccaagatgcgctcagccagccggagggcattaaccagcctggtggattggttcggcaccatggcccagga

SEQ ID NO: 637 - DNA, 401 bp, Mycobacterium tuberculosis H37Rv
ctgaggatcgcggtcgacggcgggttcctgtcggtgaccgaggagggcgtcagcattctcgccgaatctgccgagttcgagtcggagatcgacgaggccgccgccaagcaggattccgaatccgacgatccccgcatcgctgccaggggccgcgccagattgcgcgccgtcggcgcgatcgactaacccgccgatgagcgcgcccatgatcggcatggtcgtgctcgtcgttgtcctggggttggccgttctcgcactgagttatcgtctgtggaagctgcgccaggggggaacggctgggatcatgcgggacatccctgcggttggaggtcacggctggcgccacggcgtaatccgctatcgcggcggcgaagccgcgttctaccggctttctagtctgc

SEQ ID NO: 638 - DNA, 401 bp, Mycobacterium tuberculosis H37Rv
aggagggcgtcagcattctcgccgaatctgccgagttcgagtcggagatcgacgaggccgccgccaagcaggattccgaatccgacgatccccgcatcgctgccaggggccgcgccagattgcgcgccgtcggcgcgatcgactaacccgccgatgagcgcgcccatgatcggcatggtcgtgctcgtcgttgtcctggggttggccgttctcgcactgagttatcgtctgtggaagctgcgccaggggggaacggctgggatcatgcgggacatccctgcggttggaggtcacggctggcgccacggcgtaatccgctatcgcggcggcgaagccgcgttctaccggctttctagtctgcgcttgtggccggatcgccggctcagtagacggggtgtgga

SEQ ID NO: 639 - DNA, 401 bp, Mycobacterium tuberculosis H37Rv
cgtatcgttgccgccacatggggcatcgctgccgcaatgacccgtggtgatatatcagtggcgggcgtagacccggcgcatctgcagctggtgctgcacaaattgcacgacgcgggcgcaaccgtcacccagactgacgccagcttccgggtgacccagtacgagcgtccgaaggctgtcaacgttgcgaccttgccgttccccgggtttcccacggatctgcagccgatggctatcgctttggcgtcgatcgccgacggcacatcgatgatcacggagaacgtgttcgaggcgcggttccgcttcgttgaagagatgatccggctcggtgcagacgctcggaccgacgggcaccacgccgtggtgcggggcctcccgcagctgtcgagcgctccggtgtg

SEQ ID NO: 640 - DNA, 401 bp, Mycobacterium tuberculosis H37Rv
cttgcggccttcgtcgatacctgttgggcgaggaccgcccgcacggcgaattctgcctcgtcgactgtgcggggaatgcgttgcccgggtgccttgcccaccactgcgcgcagatccggatcggcgcccagcgcctcgacgatcgcttcgggatcggcgtcgaggtccagcagccgtcggcaacgtgcagtggccgtcatcaggtcgcggaaatcatcgagcacaagcaggcagcgcacatgatcgggtgccggcgtcaggctgacgatgccgttgccccatgggagccgtagcgtgcgtcggtacgcaccatcgcggacctcttcgcaacccggcaccgcggtggcggccagatggccgaaaacaccctcgaaggcgaatggtgcacggacgggtagccg

SEQ ID NO: 641 - DNA, 401 bp, Mycobacterium tuberculosis H37Rv
cgatcagcacccgggcggtctgcatgcgttgggcgcgggccaacgcgagcggaccggcgccgaccacggcctgcaacagccgctccagctggcgaatggtgtaaccgagctgggccgcgaggccgctgacaccgtcgcggtccaccgttccgtcggcaatcagccgcatcgcccgcgccacgacgtcactacgcacattccattccggagacccaggcgaggcgtcggggcggcaccgtttgcaggcccggaatccctccccctgagcggccgccgcagtcggcaggaaccggacattgcgcgcgaacggtggccggacggggcaactcggccggcagtagacaccggtggtcaaaaccgcgacgacgaaccagccgtcgaaccgggcgtctttggactgg

SEQ ID NO: 642 - DNA, 401 bp, Mycobacterium tuberculosis H37Rv
ttccggagacccaggcgaggcgtcggggcggcaccgtttgcaggcccggaatccctccccctgagcggccgccgcagtcggcaggaaccggacattgcgcgcgaacggtggccggacggggcaactcggccggcagtagacaccggtggtcaaaaccgcgacgacgaaccagccgtcgaaccgggcgtctttggactggatcgcccggtagcagcgttcgaagtcgtcgtgcacccttcaacaattacacccgcccaccgacatgactggcggaaaaacgacattgtgatggggtcgtcgtgggttcgggcaggttacctacgcggcttggtcagcccgaccggcttggccagccggaccggttggtcgtgcccacgaagtttcacatgcctacccaaaga

SEQ ID NO: 643 - DNA, 401 bp, Mycobacterium tuberculosis H37Rv
gggaccgaacagtgcgccggcaccgccgatgccgccgacgcctcctttgccgccggtgccgccggggtcgggcgcgccgagaccggttccgccggtgccgccaatgccgccagcgccgaagaggatgccggcgttgccgcccgccccgccggccccgccctcaccgcccacgagttggttaccggtgccagttccgccggtgccgccggtcccgccgttgccggtgaagatgccgccgtcgcctccggtgccgccgttccctccggccgagccggagactccgaacccgccggcgccgccggcaccgccattggagaacagcccgccgcccccgccggtgccgccggtgccaccggtgcccccgttgacgctcaacccgccggtgccgccggcaccgccgg

SEQ ID NO: 644 - DNA, 401 bp, Mycobacterium tuberculosis H37Rv
gtgcaccacctcgtcatgactgagcggcaacacgtaattttcgctgaacgcatacagcatcgagaacgtcatctcgtggtggtggtagctgcggtacaccggatctcggctgacgtagtcgagcgtgtcgtgcatccagcccatgttccacttcatcgaaaagcccaggccgccaatgttggtcgggcgggtcaccccagaccacggcgtggactcctcggcgatggtgacgattcccggcgcgaccttgtgcgccgtggcgttcatctcctgcaggaactgcactgcttccaggttctcccggccgccgtggacgttgggggtccagccgccctcgggtcgcgagtagtctagatagagcattgaggccaccgcgtccacccgcaggccgtcgatgtgga

SEQ ID NO: 645 - DNA, 401 bp, Mycobacterium tuberculosis H37Rv
cacctcgtcatgactgagcggcaacacgtaattttcgctgaacgcatacagcatcgagaacgtcatctcgtggtggtggtagctgcggtacaccggatctcggctgacgtagtcgagcgtgtcgtgcatccagcccatgttccacttcatcgaaaagcccaggccgccaatgttggtcgggcgggtcaccccagaccacggcgtggactcctcggcgatggtgacgattcccggcgcgaccttgtgcgccgtggcgttcatctcctgcaggaactgcactgcttccaggttctcccggccgccgtggacgttgggggtccagccgccctcgggtcgcgagtagtctagatagagcattgaggccaccgcgtccacccgcaggccgtcgatgtggaactcct

SEQ ID NO: 646 - DNA, 401 bp, Mycobacterium tuberculosis H37Rv
ggaatcggtacgcatcggccacggtgtgtggctcgcaaccttcataggtcacctgcaggcggtagtcgatgaggtcgacgaacggcaatgcgacggcaaacaggccagaatcgaggtgctgcaacgagaaccggtccttaccaacgagcgcgacgacctcgacggcatgcggacggaacgctcggatgacggtatggtcgtcgtattcgtgggcgcccaggatgccgtgcgggttgtgatgtgtacccgccaccaagcgcgccatttcggccggctcgggtgcaaggtgctccccggtgagtttctcggatcgactcatgagcccgtcacctcctgcgcagcagcgtgtttcggctctcgtagggcacggctggcatgttgatgatgtgggcgactgcccg

SEQ ID NO: 647 - DNA, 401 bp, Mycobacterium tuberculosis H37Rv
atgcggatgtaattggcttgcccccattggtattcttcgccggttatctcgtcgcgcacccaaaaccggtcgtagtcctccatgcccaacgccgccatgtccaaccacagcgtagcttcttcaggaccaaatgcgttgagtgtcaccaccaccaacacgcagtcgccggtggccgggtcgaacttgctgtaggccagcaacgcgtcgttgtcaacgtggtgaaaatgaatggtacgcaactgttgaaacgccgggtgcagccggcgaattatattgagccgtgtgatgaacggctgcaaagatctaccctggtccagcgcgctggcaaagtcgcggggacgcaattcgtacttctccgagtccaggtactcctcgctgccctcgcgcaccgcacggtgctc

SEQ ID NO: 648 - DNA, 401 bp, Mycobacterium tuberculosis H37Rv
gtggtggatccgctcacaactgcggtcgatgctggtggaggacgtccgggcgcggttgcggcaatcatggctggaacgtggtgcaacggatgccgaactgggttggatcgcgacggcattcgatccgaatgtgctcaccgtcggcttcgcccggcgggtcccgacctacaagcggctgacgttgatgttgcgcgatcccgatcggctcgagcaactgctgctcgacgaacagcggccgatccagctgatagtggctgggaagtcgcacccggccgacgacgggggcaaagcgctgatccagcaggtggtgcggttcgccgaccggccgcaggtccgccaccgcatcgccttcctgccgaactacgacatgtcgatggcccggctgttgtactggggctgcg

SEQ ID NO: 649 - DNA, 401 bp, Mycobacterium tuberculosis H37Rv
tgctcaccgtcggcttcgcccggcgggtcccgacctacaagcggctgacgttgatgttgcgcgatcccgatcggctcgagcaactgctgctcgacgaacagcggccgatccagctgatagtggctgggaagtcgcacccggccgacgacgggggcaaagcgctgatccagcaggtggtgcggttcgccgaccggccgcaggtccgccaccgcatcgccttcctgccgaactacgacatgtcgatggcccggctgttgtactggggctgcgacgtctggttgaacaacccgctgcggccgctagaggcgtgtggtacctcgggcatgaaaagcgcgcttaacggcgggctgaatttgtcgatccgtgacggctggtgggacgagtggtacgacggcgaaaac

SEQ ID NO: 650 - DNA, 401 bp, Mycobacterium tuberculosis H37Rv
tcgacgcggcccgcgagctggccgactaccgccggcgcgcggaagaagcgtggcccaagatcgagattgccgacgtcgacagcaccggtctgccggatactccactgctcgggtcccagctgaccctgacggcaaccgtgcggctggccgggctgaggccaaacgacgtgacggtgcagggggtgctgggcagggtcgacgccggcgatgtgctaatggatccggtcaccgtcgagatggcgcataccggcaccggcgacggcggctacgagatcttctcgacgacgacgccgctgccgctggcggggccagtcggatacaccgtgcgggtgctgcctcgccacccgatgctggccgccagcaacgagctcggcctggtcaccctggcctgacccgccgag

SEQ ID NO: 651 - DNA, 401 bp, Mycobacterium tuberculosis H37Rv
ggcggccatctcttgctggccgcgacgccgggtgccgccaagtgccgccacggcgatggcaagcagctcaggcacagacatggataccgactcggacacgggacgtggtcacatccttgcgctcaggccgggatcgtgcgtgtcggaatcgccggctcgccgggtgccaatttcagcccgtcgcctggcaggctgcgcaacccggatgccaccagctgccgtgccgcggccaggctggtatcggctaccggttgcccggcgcggaccagtggcagcgtcaaaacccggtgcggctcgacaatgaccggcggacggcccgccggatgcacgagctcctcggtgatggtgcccgtcgcacgggagcgccgcagtgcctctttgcggccgccgggggattcttt

SEQ ID NO: 652 - DNA, 401 bp, Mycobacterium tuberculosis H37Rv
caacccggatgccaccagctgccgtgccgcggccaggctggtatcggctaccggttgcccggcgcggaccagtggcagcgtcaaaacccggtgcggctcgacaatgaccggcggacggcccgccggatgcacgagctcctcggtgatggtgcccgtcgcacgggagcgccgcagtgcctctttgcggccgccgggggattctttgtagctgctgcgcttttgcaccggtacaccgtctacctcgaccagtttgtagaccatgttggcggtcggcgcgcccgacccggtgaccagcgacgtgcccacgccgtagctgtcgacgggttcaccgcgcaacgcggcgatgctgaactcgtcaaggtcgccggacaccacgatgcgcgtccgggtggctcctagcc

SEQ ID NO: 653 - DNA, 401 bp, Mycobacterium tuberculosis H37Rv
ggtccccgctttcgatcgtcgttggctccgcatgaggccgccctgctcaagaacctggcaggcgcgatgatcgggctgctcgacgatcgcgactcttcttcgccgtcagacgaactcgaggagatcaccggcatcaagaccgggcatgcgcagcgtccgggtgacccgaccttgcgtcggctgttgccggatttctaccgtcccgatgacctggatgacgatgatccgacggccgtcgacggctccgagagcttcaacgctgccctgcgcagcctgcacgaacctgagattatcgacgccaaacgtgttgccgcgcagcagttattagacacggttccggacaatggcggccggttggagctgacggaatccgacgccaatgcttggatcgccgccgtcaa

SEQ ID NO: 654 - DNA, 401 bp, Mycobacterium tuberculosis H37Rv
gacccggccaacagcgtgcgcttcgtcgacgccctgttgctcgccggcggcagcgcctacggtctggccgccgccgatggcgtcatgcgctggctagaggaacaccggcgcggcgtcgcgatggacagcggcgtggtgcccatcgtgccgggcgcggtgattttcgaccttccggtcggcggctggaattgtcggccgacggccgatttcggctattcggcctgtgcggcagccggagtcgacgtcgcggtcgggacggtgggcgtgggggttggggcgcgcgccggagcgctcaagggcggtgtcgggactgcatcggctaccctgcagtccggtgtgaccgtcggtgtccttgctgtggtaaatgccgctggcaacgtcgtcgatccagccaccggctt

SEQ ID NO: 655 - DNA, 401 bp, Mycobacterium tuberculosis H37Rv
ggcggcgtatctgttgtccgctccggagcgtaaggcccgtgcactgaaaagggccggcgcgcgttccgggcatccgaagttatgaattcgccgttggcgcccgtcggagtctttgattccggcgtcgggggactgacggtcgcgcgggccatcatcgaccaactgcccgacgaggacatcgtctacgtcggcgacaccggtaacggcccgtacggtccgctgaccatcccggagatccgggcgcacgcgctggccatcggcgacgatctggtcggccgaggcgtcaaggcgttggtgatcgcctgcaactcggcgtcgtcggcgtgcctgcgggatgctcgcgagcgctaccaggtgcccgtcgtcgaagtgatactgccggcggtgcggcgtgcggtggc

SEQ ID NO: 656 - DNA, 401 bp, Mycobacterium tuberculosis H37Rv
ggcaactcggatatttgaagctacgggcgaccccgaagcgtttaccaaattggccgcacgattcctgggtccggtgctcggtggtgtgcaacccgttcacccatcgcgcattcattaggccatggaagagattctcgtcaccgaatgcgtcgatgtattccgcatcgttgtatcgggcatggcacagtagtgtccgtgcggataaccgtgctcggatgctccggtagcgtcgtggggccggattcgcctgcgtcggggtatttgctccgagcgccgcacacaccgccgttggttatcgacttcggcgggggtgtgctcggcgcgctgcaacggcacgcggatcccgcgtcggtgcatgtgctgctgtcgcatctgcatgcggaccattgtctggacttgcc

SEQ ID NO: 657 - DNA, 401 bp, Mycobacterium tuberculosis H37Rv
tgctcatcgaattcggtcacaccaaggtcctgtgcaccgccagcgtcaccgaaggggtgccccggtggcgtaaagcaaccggtctggggtggctcaccgcggagtacgccatgctgccgtcggccacccacagccgctctgatcgcgagtcggtgagaggcaggcttagcgggcgtactcaggaaatcagtcggctcatcggccggtcgctgcgcgcatgcatcgacctggcggcgctgggggagaacacgatcgctatcgattgtgatgtgttgcaggccgatggtggcactcgaaccgcggccatcaccggcgcctacgtggcattggccgacgcagtgacctacttgtcggcggcgggtaagttgtccgaccccaggccattgtcgtgtgccatcgcc

SEQ ID NO: 658 - DNA, 401 bp, Mycobacterium tuberculosis H37Rv
cgaatcctctcgacggcgatggcaggctcggcgtgctgcgccgcgggcgtttcgggtgcggtcatgcggtggtcctgttctgcttcctggcatcgtccttggctagctcggctaggtaggcgttgtattcccgtagtacgggatcgtcgggtggctgctgcgccggcttcggccgctcgggcagcaatccggcaggtatctcggcggcggcgccgccggtgggcggttgcgggggcgtctcttcataccgaacgaagttgcggtacgcgtagacgcagaaccaagcaaacaatggccactgcaacgcgtaacccagattttgaaaggtgcccgaggtcgattgaaacctggtccactgccaccaacccagggccaggcaaccacaggtcgcgatgatcacc

SEQ ID NO: 659 - DNA, 401 bp, Mycobacterium tuberculosis H37Rv
catccgttcccgcgagacggcatgggcggttgatcgaggcgatctagcgctgcggacacatccacccgtacccggccagactcaagtggttctcccagaccgattctgcgtaccgcttcagctaccgtcgctgcgcccacccagatatcgcctgccaactgcggccatccccacaacgtctggtcaacttcgatcatcgaagccgcacaacgcgccgagagctcttggcaatcaaggatgttgagaacgtgggggactttgtcttttgtggtcagtccacacagcttgtcggcgtcgatgtcgcccaatagcccatgaaagatcggtcgcccaggttcgacgtcgtagcgttcgacatcgaccaggccgcggtcactggtcgccatcagtacggggacacc

SEQ ID NO: 660 - DNA, 401 bp, Mycobacterium tuberculosis H37Rv
gattcaggttcgacagctcaattttgtcgaaatcggccaaccgcagtgtgccacaggcaccttcggcggcaagggtgtatgcgatcgcatggccggcgctgagtccgacgacgccgacccgtagcgcgtgcagtgcgcgttgttcctcagcggtgatgaggtgcctgttgcggtccaagcgcacggcacggaacccccggagacccagaatggcaacaaccatgcgccgccagggataataggcccatcgcttcgcttcttctagcagatctggatcaggctgtggcagcaggcgccgcacgcccgctagctgttctgcgaatcggtcgacgaactcgatgctcggatctgagcgtagtcgatcgagcaccaggacatcgtcgtggtcatcgtcacgaagg

SEQ ID NO: 661 - DNA, 401 bp, Mycobacterium tuberculosis H37Rv
ctctcgaatcgacggccgcccgcatctgagttagccaggccagcggtttcctacgggcgctgggtgcaaagatacgacttccgggtgcaatagttacgcgctatcgctgatgttcttgtccgcaccggccttcagagttgagccaacgcgtagtcgccactcggcactacggtgggcgcgtcatcgacgcttcgctgacggcccgaggtggcagatgttgcgctcgctgcagatcgccgatcaaatcgctcgtacgggtcacatgccagtgaggcgtcttgatctgatctggatcagcgcacgaaacgccgcgagacgggagcttgatctgggcgtggctgcgctggtggaggctgtgacgttgctcactgctgacgtcgagggctcgacacggctgtcgc

SEQ ID NO: 662 - DNA, 401 bp, Mycobacterium tuberculosis H37Rv
gtgcgccgagctggtcgttgagctgctgggtgcctgcccggagttaagcattttggcgaccagccgcgagtcgatcggcgtgaccggcgaggtcacatgggtggtgccgtcgttgtctccggcgaacgaagcaatccagttgttcactgaacgtgcgcgcctagtccaacccaattttgagatcgttgctgacaacttcgacgccgtgagcgagatctgccggcggctagacggtatgcccctggcaatcgagttggccgcggcacgattgcggtcgttgtcgccaaacgagatcgccaacagtttggatgaccgattccgcctgctgaccggtggtgctcgcagtacggtgcagcgccagcagacattacgggcatctatggattggtcgtacgcactgc

SEQ ID NO: 663 - DNA, 401 bp, Mycobacterium tuberculosis H37Rv
tcgggattcacaccggtgaggcgcagttggtcgacgagcgcatctacgccggcgccacaatgaacctggctgcagagctacgggatttagcccatggtgggcagaccgtgatgtcgggtgctaccgaggatgcggtactcggccggcttcccatgcgcgcttggctaattggcttgaggcccatggaagggtccccggaagggcataacttcccccagtcacaacgcatagcacaattgtgccatccgaaccttcgcaacacctttccgccgctgcgcatgcgcatcgccgatgcgagcggaattccttatgtggggcggattctggttaacgttcaggtagttccccactgggaaggagggtgtgccgcagcggggatggtccttgctgggtgaagcgcc

SEQ ID NO: 664 - DNA, 401 bp, Mycobacterium tuberculosis H37Rv
ggcacacggggcattacgtacgcccgcggcggcatccgcaacgcattgctaaccccgccgaacccgccgccgctattggtcagttgccccagcggtagcccgcccagcatgtgtccgggggcggtttgggcggcgctggtcaggctggtcagcggcagcgcccgcgccgccggggtgaccgcctggttggccgcggcccaggcctgcggcaccgacaacgaaccgaccgaggccgcccgacccaagttggcggccaccccagcgcccagacccgaagaacccagcgacgaacccagctggctgcccagcgagctcatcgcctggaccccgttttgcgccgcggtttccacggcctgagccgccgccggagcaaagcccttcaacatcgagtgcaaggtgct

SEQ ID NO: 665 - DNA, 401 bp, Mycobacterium tuberculosis H37Rv
acacggggcattacgtacgcccgcggcggcatccgcaacgcattgctaaccccgccgaacccgccgccgctattggtcagttgccccagcggtagcccgcccagcatgtgtccgggggcggtttgggcggcgctggtcaggctggtcagcggcagcgcccgcgccgccggggtgaccgcctggttggccgcggcccaggcctgcggcaccgacaacgaaccgaccgaggccgcccgacccaagttggcggccaccccagcgcccagacccgaagaacccagcgacgaacccagctggctgcccagcgagctcatcgcctggaccccgttttgcgccgcggtttccacggcctgagccgccgccggagcaaagcccttcaacatcgagtgcaaggtgctggc

SEQ ID NO: 666 - DNA, 401 bp, Mycobacterium tuberculosis H37Rv
cacggggcattacgtacgcccgcggcggcatccgcaacgcattgctaaccccgccgaacccgccgccgctattggtcagttgccccagcggtagcccgcccagcatgtgtccgggggcggtttgggcggcgctggtcaggctggtcagcggcagcgcccgcgccgccggggtgaccgcctggttggccgcggcccaggcctgcggcaccgacaacgaaccgaccgaggccgcccgacccaagttggcggccaccccagcgcccagacccgaagaacccagcgacgaacccagctggctgcccagcgagctcatcgcctggaccccgttttgcgccgcggtttccacggcctgagccgccgccggagcaaagcccttcaacatcgagtgcaaggtgctggcc

SEQ ID NO: 667 - DNA, 401 bp, Mycobacterium tuberculosis H37Rv
ctattggtcagttgccccagcggtagcccgcccagcatgtgtccgggggcggtttgggcggcgctggtcaggctggtcagcggcagcgcccgcgccgccggggtgaccgcctggttggccgcggcccaggcctgcggcaccgacaacgaaccgaccgaggccgcccgacccaagttggcggccaccccagcgcccagacccgaagaacccagcgacgaacccagctggctgcccagcgagctcatcgcctggaccccgttttgcgccgcggtttccacggcctgagccgccgccggagcaaagcccttcaacatcgagtgcaaggtgctggccatcgacacacccgagttggtcatcgacacgtggttgttgagcatcgacacgatgttgctgagcggcga

SEQ ID NO: 668 - DNA, 401 bp, Mycobacterium tuberculosis H37Rv
aggcctgcggcaccgacaacgaaccgaccgaggccgcccgacccaagttggcggccaccccagcgcccagacccgaagaacccagcgacgaacccagctggctgcccagcgagctcatcgcctggaccccgttttgcgccgcggtttccacggcctgagccgccgccggagcaaagcccttcaacatcgagtgcaaggtgctggccatcgacacacccgagttggtcatcgacacgtggttgttgagcatcgacacgatgttgctgagcggcgacagatgcggcgagatggctttccagagttcactcagttggtcgaacggccagatgcttttcgtgggctgggccagttgttgcagcgcttggggcacattgttcatcaactggttcgccgcggcggtg

SEQ ID NO: 669 - DNA, 401 bp, Mycobacterium tuberculosis H37Rv
ctgcggcaccgacaacgaaccgaccgaggccgcccgacccaagttggcggccaccccagcgcccagacccgaagaacccagcgacgaacccagctggctgcccagcgagctcatcgcctggaccccgttttgcgccgcggtttccacggcctgagccgccgccggagcaaagcccttcaacatcgagtgcaaggtgctggccatcgacacacccgagttggtcatcgacacgtggttgttgagcatcgacacgatgttgctgagcggcgacagatgcggcgagatggctttccagagttcactcagttggtcgaacggccagatgcttttcgtgggctgggccagttgttgcagcgcttggggcacattgttcatcaactggttcgccgcggcggtgtcga

SEQ ID NO: 670 - DNA, 401 bp, Mycobacterium tuberculosis H37Rv
cagacccgaagaacccagcgacgaacccagctggctgcccagcgagctcatcgcctggaccccgttttgcgccgcggtttccacggcctgagccgccgccggagcaaagcccttcaacatcgagtgcaaggtgctggccatcgacacacccgagttggtcatcgacacgtggttgttgagcatcgacacgatgttgctgagcggcgacagatgcggcgagatggctttccagagttcactcagttggtcgaacggccagatgcttttcgtgggctgggccagttgttgcagcgcttggggcacattgttcatcaactggttcgccgcggcggtgtcgatggcctcctcgaccgcgacggcctgctcaaggagcccgccggggttggtgatcagtggggcgt

SEQ ID NO: 671 - DNA, 401 bp, Mycobacterium tuberculosis H37Rv
gctatcagaatcatcagttcagcacggttctcggcgatcaccggcgggggcaccgtcagcccatacgccgtctcgtaggccgccgcagcaacccggacctgggcggcggtcagctcggcctgccccgcggtgacgctcatccacgccacatacggcgaggccgccgccaccatcagacccgccgacgaacctatccacgatcccgtcgtcagaccccagaccaccgactgaaacgccgacgcggccgaaaacaggtcactcgccacgctgtcccacatcttcgcggcggccaccagcgaggccgaacccgggccggcgtacatcctcgcggagttgatctccggtggtaacgccccgaagtccaccacttcgataatccttccgctcggccataactagca

SEQ ID NO: 672 - DNA, 401 bp, Mycobacterium tuberculosis H37Rv
tcagaatcatcagttcagcacggttctcggcgatcaccggcgggggcaccgtcagcccatacgccgtctcgtaggccgccgcagcaacccggacctgggcggcggtcagctcggcctgccccgcggtgacgctcatccacgccacatacggcgaggccgccgccaccatcagacccgccgacgaacctatccacgatcccgtcgtcagaccccagaccaccgactgaaacgccgacgcggccgaaaacaggtcactcgccacgctgtcccacatcttcgcggcggccaccagcgaggccgaacccgggccggcgtacatcctcgcggagttgatctccggtggtaacgccccgaagtccaccacttcgataatccttccgctcggccataactagcaccaa

SEQ ID NO: 673 - DNA, 401 bp, Mycobacterium tuberculosis H37Rv
cagaatcatcagttcagcacggttctcggcgatcaccggcgggggcaccgtcagcccatacgccgtctcgtaggccgccgcagcaacccggacctgggcggcggtcagctcggcctgccccgcggtgacgctcatccacgccacatacggcgaggccgccgccaccatcagacccgccgacgaacctatccacgatcccgtcgtcagaccccagaccaccgactgaaacgccgacgcggccgaaaacaggtcactcgccacgctgtcccacatcttcgcggcggccaccagcgaggccgaacccgggccggcgtacatcctcgcggagttgatctccggtggtaacgccccgaagtccaccacttcgataatccttccgctcggccataactagcaccaat

SEQ ID NO: 674 - DNA, 401 bp, Mycobacterium tuberculosis H37Rv
cgccgcagcaacccggacctgggcggcggtcagctcggcctgccccgcggtgacgctcatccacgccacatacggcgaggccgccgccaccatcagacccgccgacgaacctatccacgatcccgtcgtcagaccccagaccaccgactgaaacgccgacgcggccgaaaacaggtcactcgccacgctgtcccacatcttcgcggcggccaccagcgaggccgaacccgggccggcgtacatcctcgcggagttgatctccggtggtaacgccccgaagtccaccacttcgataatccttccgctcggccataactagcaccaatgatggacagcaaacaacgtcggcaacaggtcaaattctctcaagtagtcacaaccccagatgcaaagtgcaccag

SEQ ID NO: 675 - DNA, 401 bp, Mycobacterium tuberculosis H37Rv
gccgcagcaacccggacctgggcggcggtcagctcggcctgccccgcggtgacgctcatccacgccacatacggcgaggccgccgccaccatcagacccgccgacgaacctatccacgatcccgtcgtcagaccccagaccaccgactgaaacgccgacgcggccgaaaacaggtcactcgccacgctgtcccacatcttcgcggcggccaccagcgaggccgaacccgggccggcgtacatcctcgcggagttgatctccggtggtaacgccccgaagtccaccacttcgataatccttccgctcggccataactagcaccaatgatggacagcaaacaacgtcggcaacaggtcaaattctctcaagtagtcacaaccccagatgcaaagtgcaccagc

SEQ ID NO: 676 - DNA, 401 bp, Mycobacterium tuberculosis H37Rv
gcagcaacccggacctgggcggcggtcagctcggcctgccccgcggtgacgctcatccacgccacatacggcgaggccgccgccaccatcagacccgccgacgaacctatccacgatcccgtcgtcagaccccagaccaccgactgaaacgccgacgcggccgaaaacaggtcactcgccacgctgtcccacatcttcgcggcggccaccagcgaggccgaacccgggccggcgtacatcctcgcggagttgatctccggtggtaacgccccgaagtccaccacttcgataatccttccgctcggccataactagcaccaatgatggacagcaaacaacgtcggcaacaggtcaaattctctcaagtagtcacaaccccagatgcaaagtgcaccagccgc

SEQ ID NO: 677 - DNA, 401 bp, Mycobacterium tuberculosis H37Rv
ccgacacggccgcgcgcaccaccttggcggtggttttcagtgacttctgtttggccgccggagccacgatctgctgcgtgaactggtcgtagtaggacaggaaatcgccggcgaggtgcgacctggcggtagcgaagtcttggtcgagcgtgtcgggtgaatacgacaacagcgcgattgtcccgtcagacgccgcggcgacggcagcacgggcggcgccggagtccgtctgctgatcgggtcggtattgctcaaggtatagccatcccgtcgcgcccccagagatcaacatgagcaggatgagaatcaccggaacgggtttcaaggtaacctgcattcgccacaggtcacggtgccgctgacccttctgcgcggtagattccgttgcagagtcggtgtca

SEQ ID NO: 678 - DNA, 401 bp, Mycobacterium tuberculosis H37Rv
ccgcgacgagcaccacggcggaatgctcgttcatggattcgacggctgtcgcgttcaccgtgccttcggtgaccactttggactgttcgacaaccttggtgaaatcggctgcccgctgctggaagtcatccctgaattcgccggtggagctgtcgatcacacgcgcgacgtcttctttggccttgttgaagtccagcgaggtcatgttgatgacaccttgcttggctccggcggcgaacgccgcggcgcgctgctggcgttcggtggcctcatggtgttgccacacaatgtatccgctgagcccggtgaagccgcagatgatgacgactgcggccgccatggcaatcgtggacagtcttggtaaccgcacccgcaaccgccgtcgccaggatgccgaccgt

SEQ ID NO: 679 - DNA, 401 bp, Mycobacterium tuberculosis H37Rv
acccgcgccggttggttcgacataccgcgcactcgcgtccgcggtcaccagcagcggtggcgggtgtccggctgtgcagtactggaattcgcccgaggtgaagtcgagcgagccgacacacatggtggccgatttcgatccaggtacctgtttatggaagcggtccactgcctcaagcgcctcgacgaccgtgtaccccgccgagatctgcatgcgtaacgccgtacgtaattgcgacatgaccgctgcggcctccacgccgtggcccacgacgtcgccaacgacgagcaccaaccgatccccgagggccagcgcgtcgaaccagtcgccgccggccgcggtatcctcggcggcgaccaggtactcggcggctatgtcggcgccgggaaccacgggcaccg

SEQ ID NO: 680 - DNA, 401 bp, Mycobacterium tuberculosis H37Rv
caacgtgccctaccagcttgccggaaaagcaaaagtgcgtttggggcaggccgccacttatgtcgctgacagcgcggactccgtggtcgggtgtacgggcagcacgtcgccgtatccgcaggcgtggatgatgcgcgcgacagcacggtcgcggcttaccaggcgcacgtccacgccccggcgtcgacaccgttcggcctcgtgagcaaggacggcgactgcgcagcagcccatgaaatcgaggccgttgaggttgaccacgagtggttccggcgcggtggtggccgcggccgccttcgtgaccagatcttgccaagtgtgctcattggcggcgtcgatctcgccacgcgcatggataatcacagccgagtcgtggtgctggatggtcgccttgagcgcgt

SEQ ID NO: 681 - DNA, 401 bp, Mycobacterium tuberculosis H37Rv
gctggaagccgagcgcaccgacagcaatatcgagatcgttgcgctcgtcagtaagtcgttgggaaccctgaagcaaacgcattcgcggtacttcactggtgaagagctgaacgtcggaaacggcgcgcggtaggcccttgggtttccgcgagtgtgccgggtccggtcgacatggggaggttcggtcaacatgtctacccggcactagagcccgagcgcccgataggtgcggcggacgaattttggttgcgcggtccgcagtttcgccagggatgggttacccgcgacggccgcggcagcgtccacggacagatcgggacaatgctggatcagatacagcagtatcaggtcggcgctcgggtcggcctgccaccatgtcccgtacgcgccgggccagctga

SEQ ID NO: 682 - DNA, 401 bp, Mycobacterium tuberculosis H37Rv
gtcatcggcggtcgaccacaacccgccgccggcgttacagaacgacggcggcgtgacgtgtggcggccccatcacgtcgtgccgcaaccggtcttgttcgtcgagccggtacatggtcgcggcccgtcgctgcgcgtcggccgacacgtagaagccggtgtcggtcattcctgccggacccagcactcgctcgtcgatgatctggtacagcggtgcgtcctcgatgcgggagacaatgacacccaagacgtcgatggcgtggctgtaggtcacccggtcgccaggttggtgcacgagcggaagggttgccagcgctgccagccaaacgtcgggaccctggccgaacggcagtcgctgataggcccgcgaaattggccccgacaccgagaaaccgtaagcca

SEQ ID NO: 683 - DNA, 401 bp, Mycobacterium tuberculosis H37Rv
caccacccgtatacccagagcgaggtggacatcaagaagaacgtgttcacgatgatgatgcggctaccgtggttgtatcgcgttcccgtacatacgattcacaaatttggccacatgctcagcggcatggcgatccggatcgtcgacgtcttcaggatcacgcgcaaggtaggtgtcgaggaatcctacggaagctggcgcgccgcgcttccacacttccttggatcggccggggtgcgcttgcttctggtgagtgaattggtggtcttcgcgatcgccggcgacttctggccctgggcactgcaattcgtagcgacgctgtgggttagtaccttcttggtggtggcgagccatgagttcgaggacgacacccagggcggtgccgtcaacggcgaggactg

SEQ ID NO: 684 - DNA, 401 bp, Mycobacterium tuberculosis H37Rv
gaccgaggagttccgggattggatggaggggccgaatcagcctccccctggcataggtttcacacatctgaaggggatcggcactctggccaacatcctgcaccagctaggcacggtatgggtccgccgtcacctacccaacgtggccttgtttcattacgccgattaccaggcggacttggcgggcgagctgctccggccggcaagggtcctcggtatcgccgcgacccgcgatcgagcccgggacctggcgcagtacgccacgctggatgcgatgcgctcccgcgcgtcagaaatcgctcctaacaccaccgacggcatctggcacagtgacgagcgtttcttccgccggggcgggagtggcgactggcagcagttcttcaccgaagccgagcacctgc

SEQ ID NO: 685 - DNA, 401 bp, Mycobacterium tuberculosis H37Rv
acgatgacgtggggtcgaccctgagtcagggctcgacgacaggtgtgttgtcgggcccgaattggtcgtactggccaagccgtgtattagggtctgcggacccgacgacgatcgctcaccggcacggcacccaccgcatcactagcccggacgagacctggctggccctgcagccctttctcgcgccagcaggcattaccggggtcgccgacgtgacatggctggattgtcttggcattccaacggttcaggcggtgcgcccggcatcgctgacgttgtcggtcagccagggcaaagccgccagctatcgggctgcccaggtctcggcggtgatggagtccttggagggatggcacgccgagaacgtcactgccgacttgtggtctgcgaccgcccgggat

SEQ ID NO: 686 - DNA, 401 bp, Mycobacterium tuberculosis H37Rv
tggtcgtactggccaagccgtgtattagggtctgcggacccgacgacgatcgctcaccggcacggcacccaccgcatcactagcccggacgagacctggctggccctgcagccctttctcgcgccagcaggcattaccggggtcgccgacgtgacatggctggattgtcttggcattccaacggttcaggcggtgcgcccggcatcgctgacgttgtcggtcagccagggcaaagccgccagctatcgggctgcccaggtctcggcggtgatggagtccttggagggatggcacgccgagaacgtcactgccgacttgtggtctgcgaccgcccgggatctcgaggcagacctgacttacgaccccgcccaacttcgccaccggccgggcagcctctacca

SEQ ID NO: 687 - DNA, 401 bp, Mycobacterium tuberculosis H37Rv
ggtgccaactgacgatgtcgccggctctgacagcgcccacctggttgagatgatccgtgacgccggggacgatgtggaccttgcccgcatcgatgtctgggacggttactactgttttgccgccgagctcacctccgcgacgctggaggtgaccttcggcgggttcgggttacaccacgaccctaacgtggcgttatcgcgggcgatcaccgaagccgcccagtcgcgcatcacggcaatcagcggagcccgcgaggacctcccgtcggcgatctaccaccggttcggccgggtgcatacatacgcgaaggcgcgaaagacgtcgttgcggctgaaccgcgcgcggccgacaccgtggcgggtgcccgatgtcgactcgctgcccgagttggtggcgtcgg

SEQ ID NO: 688 - DNA, 401 bp, Mycobacterium tuberculosis H37Rv
catgcgcacctgggcgcggctgctgagtgaggtcggcgccccggaccagcgcggcctcgccgcacagttgcggtcactgcgggtcgatgtcaaacacgccgatgcgctgctggcgttgcggcagctcggccagcgcccccgggtggagccgcttcgtccgggtccgccgcccaccgtgtggtcgcggcggtggcggcagcgatgggcaccgcccacctccgtcgccgcatcggccgaccacggcgagtcttttgtcgacgtcaccgacttggaggtcttgtcgtttttgagcgtgagctcggttgactactgggcctaccggccagcactgcaacaggtcgctgcctggtactggacgttgaaacaccccgaacaatccggaagcgtcggtgagcgtgccg

SEQ ID NO: 689 - DNA, 401 bp, Mycobacterium tuberculosis H37Rv
tgacccgctccagctcggcgatccgcgcggtcaggctcgcctcatcgtcgcgcgaatccacgcccgcgaggctcactaaatcgaacatgtgttcgagtatagcaggcctgggccaccgcggccaccgcaccgcgggcccgcagcgtgcgagtgctacgctgccgagcggtcgacatcctttaacgatccgtccagagaggcggagaaggaggtcaaggtttcccatgggtgctgcgggtgatgccgcaatcggccgggagtcccgcgagttgatgtccgcggccgacgtcggccgcacgatttcgcgcatcgcgcatcagattatcgagaagaccgcgttagatgacccagtcggacccgacgcgccgcgggtggtgctgctgggaatcccgacccgtggc

SEQ ID NO: 690 - DNA, 401 bp, Mycobacterium tuberculosis H37Rv
cggtcaccgtcgggctggccggagccgagctgaccgagatgggcatgatgaacgccggcgccgcccaggtgcggatgttctccgacgacggggtctgcgtgcatgacccgctgatcatgcgccgcgccctggaatatgccaccggtttgggcgtgctgatcgcccagcacgccgaggagccccggctgacggtcggcgccgtcgcgcacgagggacccatggcggcgcggctgggcctggcgggatggccgcgggccgccgaggaatcgatcgtcgcccgcgacgccttgctggcccgtgacgccggcgcccgggtgcacatctgtcacgcgtcggccgcgggcaccgtcgaaatcctgaaatgggctaaggaccagggtatttcgatcaccgccgaggtc

SEQ ID NO: 691 - DNA, 401 bp, Mycobacterium tuberculosis H37Rv
cgtggtggccaccgcgccgcagatcggcaacaccggctggaacggcgaggactccgaaagccgaggggagcggatctgggtcgccggttacgcggtgcgcgacccgtcgccgcgcgcgtccaactggcgcgccaccggcacgttggaagacgaactcatccgccagcgcatcgtcgggatcgccggcatcgacacccgggccgtggtgcgccatctgcgcagccgcgggtcgatgaaggcgggggtgttctccgacggggcgctggccgagcctgccgacttgatcgcgcgggtgcgagcacaacagtcgatgctgggcgccgatctggccggcgaggtcagcaccgcggagccgtatgtcgtcgaacccgacgggccaccgggtgtttcgaggttcaccg

SEQ ID NO: 692 - DNA, 401 bp, Mycobacterium tuberculosis H37Rv
cgccactcagctatcccccgaacacccggtgctcgtcgaccgcttcctcgaggacgcggtcgagatcgacgtcgacgcgctgtgtgatggcgccgaggtctatatcggcgggatcatggagcacatcgaggaggccggcatccactccggtgactcggcctgtgcgctgccaccggtcacgttgggccgcagcgacatcgcgaaggtgcgtaaggccactgaagccattgcgcacggcatcggcgtggtggggctgctcaacgtgcagtacgcgctcaaggatgacgtgctctacgtcctggaagccaacccgagagcgagccgtaccgttccgtttgtatccaaggccacagcggtgccactcgccaaggcatgcgcccggatcatgttgggcgccacca

SEQ ID NO: 693 - DNA, 401 bp, Mycobacterium tuberculosis H37Rv
gtcgaccgcttcctcgaggacgcggtcgagatcgacgtcgacgcgctgtgtgatggcgccgaggtctatatcggcgggatcatggagcacatcgaggaggccggcatccactccggtgactcggcctgtgcgctgccaccggtcacgttgggccgcagcgacatcgcgaaggtgcgtaaggccactgaagccattgcgcacggcatcggcgtggtggggctgctcaacgtgcagtacgcgctcaaggatgacgtgctctacgtcctggaagccaacccgagagcgagccgtaccgttccgtttgtatccaaggccacagcggtgccactcgccaaggcatgcgcccggatcatgttgggcgccaccattgcccagctgcgcgccgaaggcttgctggcggt

SEQ ID NO: 694 - DNA, 401 bp, Mycobacterium tuberculosis H37Rv
aattgcgcgccgcgggcgaacggatgcgcgatgccgtcgcctatctcgctgccgtgtagcgggtgccctgccaccgcgccgctaaatcccaccagcatggggtggtgagcccagcgctcgtgtgaccaaactcaccgccctgggccgtcgtcacgctgtgttaacctctcgttcaaatgatattcatattcaatagtggcgctaagtgtccggttgaatccccgttgaacccccaacagatggagtctgtgtcgtgacgttgcgagtcgttcccgaaagcctggcaggcgccagcgctgccatcgaagcagtgaccgctcgcctggccgccgcgcacgccgcggcggccccgtttatcgcggcggtcatcccgcctgggtccgactcggtttcggtgtgca

SEQ ID NO: 695 - DNA, 401 bp, Mycobacterium tuberculosis H37Rv
cgaatcgggtgccagttatgccgctagggatgcgctggcggcggcgtcgtatctcagcggtgggctatgaccgagccgtggatagccttccctcccgaggtgcactcggcgatgctgaactacggtgcgggcgttgggccgatgttgatctccgccacgcagaatggggagctcagcgcccaatacgcagaagcggcatcagaggtcgaggaattgttgggggtggtggcctccgagggatggcaggggcaagccgccgaggcgtttgtcgccgcgtacatgccgtttctggcgtggctgatccaagccagcgccgactgcgtggaaatggccgcccagcaacacgtcgtcatcgaggcctacactgccgcggtagagctgatgcctactcaggtcgaact

SEQ ID NO: 696 - DNA, 401 bp, Mycobacterium tuberculosis H37Rv
gatctccgccacgcagaatggggagctcagcgcccaatacgcagaagcggcatcagaggtcgaggaattgttgggggtggtggcctccgagggatggcaggggcaagccgccgaggcgtttgtcgccgcgtacatgccgtttctggcgtggctgatccaagccagcgccgactgcgtggaaatggccgcccagcaacacgtcgtcatcgaggcctacactgccgcggtagagctgatgcctactcaggtcgaactggccgccaaccaaatcaagctcgcggtgttggtagcgaccaatttctttggcatcaacaccattcccattgcgatcaatgaggccgagtacgtggagatgtgggttcgggccgccaccacgatggcgacctattcaacagtctcca

SEQ ID NO: 697 - DNA, 401 bp, Mycobacterium tuberculosis H37Rv
tatttatcggaaggatgacgatagtgagcgaaaagggtcggctgtttaccagtgagtcggtgacagagggacatcccgacaagatctgtgacgccatcagcgactcggttctggacgcgcttctagcggcggacccgcgctcacgtgtcgcggtcgagacgctggtgaccaccgggcaggtgcacgtggtgggtgaggtgaccacctcggctaaggaggcgtttgccgacatcaccaacacggtccgcgcacggatcctcgagatcggctacgactcgtcggacaagggtttcgacggggcgacctgcggggtgaacatcggcatcggcgcacagtcacccgacatcgcccagggggtcgacaccgcccacgaggcccgggtcgagggcgcggccgatccg

SEQ ID NO: 698 - DNA, 401 bp, Mycobacterium tuberculosis H37Rv
tatcaccgccgttgccgccggcaccgccgtcgccgatcagccaggcattgccaccggccccgccggcgccgctaattgcgccttgcccgccgttgccgccggcaccgccgttgccgatgagcccgccggtaccgccggcaccgcccgcgcccccgaagttattctccccgactttgcctccaaccccagtttgcccgccgcgcccgccggccccgccgctgcccgacaggccgcggccgtcgccgccggtgccgccggccccgccgttgcctcctgagctgacgccggttccgccctgcccgccgtgtccgccggcgccgccgtcgccgtgcagccagccaccaccgccaccggcgccgccgataccccccgtgccgccgtcgccggacttgccgccaccg

SEQ ID NO: 699 - DNA, 401 bp, Mycobacterium tuberculosis H37Rv
agcattggccgtgctgatcgccgagccgatgcttgccagatccgtcgccgccgcgcccagcatttccggctgtgcaaacaaaaacgacatgaccgtccccctgaatcctgtgggtatgagcagacttgtcgtgatcgtgcagcataagcgcaggtgatataggccatcattggtaatgttatagaaacgttataggtgatcttgaccttgtcaaattgttcgacaaggagtgcggtcttattgcaactttgtttattaatgtcgcgcggcccgcggcctgggacctccgtcggacagcggcgacacgatgcaactatgggggccgcagcgaggtgtcgtcggtgtcatgcccgcggtcggtgccccggcaccgcaaatggtggtttcagctgctcgaacat

SEQ ID NO: 700 - DNA, 401 bp, Mycobacterium tuberculosis H37Rv
tattgcaactttgtttattaatgtcgcgcggcccgcggcctgggacctccgtcggacagcggcgacacgatgcaactatgggggccgcagcgaggtgtcgtcggtgtcatgcccgcggtcggtgccccggcaccgcaaatggtggtttcagctgctcgaacatggggaaatgccacacgttgagggttgccaattgcaggtcctggacgtcggcggtagcagctatcagatagtcgccaagtccaatccggttgtggctgcgacgatatcggcgcatcatgtcgccggcgcggcgtgcgattacctcggttgctggctgtacccgaaacgatgcaagcaggcgccacacctcgcgccgttcggcggtccgcattccgccgatgagttcggcggtggacacc

SEQ ID NO: 701 - DNA, 401 bp, Mycobacterium tuberculosis H37Rv
atcgggccgagtggcgccatcacctcttctgccatcagggcgtagtcacccagggcccacatcgcccggtgtgtggccgcaagcgtttggtcctcgcgagcaggtgtgtcgatagtcatcaggtctcctgagaagtaagtgatgtggctgcgaacttcgacatcgttgtcgcgggcacggcgggagcctgggcagtagcgtgccttgcgtacccaccggatacagtatgcatcagaaatagtgtattcctctaactatcgcgcgtgtcggaattgtggcccacgccacgtcggcggcgcttcttagactgggcgcgtgcgccttgtctttgccggcacccccgaacccgcgctggcctcgctgcgcaggctcatcgaatcgcccagtcacgacgtgatcgc

SEQ ID NO: 702 - DNA, 401 bp, Mycobacterium tuberculosis H37Rv
gtcagccggcggacgtagcggcactggccaagctacaacgcgagttgttgagcgccgccatcgcgctgactcggcccggcggtgtcgtgctctatgccacatgctcgccgcacctggccgagactgtgggtgctgtcgccgacgcgctacgccgacatccggttcacgcgctcgatacccgcccactgttcgagccggtgatcgcggggctgggggaggggccccacgttcagctgtggccgcaccggcacggtaccgacgccatgttcgccgcggcgttgcgccgcctgacgtgaggttcgccgcagcggctcagtaatgtgtcgctcatggccggtagcacggggggaccgctgatagcgccgtcgatcctagccgctgatttcgccagactcgcggac

SEQ ID NO: 703 - DNA, 401 bp, Mycobacterium tuberculosis H37Rv
cggcgtcgactgctttgtcgccggatcggcggtgtacggcgccgatgacccggccgcggcggttgcggcactacggcgacaggccggtgccgcctcactccacctgagcctatgaacgtggagcaggtcaagagcatcgacgaggctatgggtctcgccatcgagcactcctaccaggtcaaaggcacgacttatccaaaacccccagtgggggccgtcattgtggatcccaacggtcggatcgtcggcgccggcggcaccgagccggccggtggcgatcatgccgaggtggtggcgctgcgccgggccggcggattggctgccggcgccatcgtggtggtcaccatggaaccctgtaaccactacggcaagactccgccatgcgtgaacgctctgatcga

SEQ ID NO: 704 - DNA, 401 bp, Mycobacterium tuberculosis H37Rv
agcaggtcaagagcatcgacgaggctatgggtctcgccatcgagcactcctaccaggtcaaaggcacgacttatccaaaacccccagtgggggccgtcattgtggatcccaacggtcggatcgtcggcgccggcggcaccgagccggccggtggcgatcatgccgaggtggtggcgctgcgccgggccggcggattggctgccggcgccatcgtggtggtcaccatggaaccctgtaaccactacggcaagactccgccatgcgtgaacgctctgatcgaagccagggtggggacggtggtctacgccgtcgccgacccgaacgggatcgctgggggtggcgcgggccggctgtcagcagcgggcctacaggtgcggtccggggtgttggctgaacaggtg

SEQ ID NO: 705 - DNA, 401 bp, Mycobacterium tuberculosis H37Rv
tgaacctcgaagtcgacgtagtcgcaaagtatgttgagcggttaatgcggagcgccggctgacatcgctcgccgagggagggagccccatgtcttgcattccggacgagatcgatacgcccgacgtgctgatcgaccgcgacatccttgaccgcaacatcgggcgaatgagttccgccgtcgccgcgaaagggatcgccctgcgtccccacgtgaagacgcacaagctgcctgagatcgcccatatgcaactccgcgcgggcgcgcggcctgacggtggccaccatcggggaagtcgaggtattcgtcgaccacggcgccgacgacgtattcatcacctacccattgtggatcggcacacgccaagccgaccggctccgtcagctggctgaccgcgctcgc

SEQ ID NO: 706 - DNA, 401 bp, Mycobacterium tuberculosis H37Rv
cttcaagcccggattccccatggcggaatgggcgtcgaaacggcgggcccaactggacagccaggtttaacgccagcccccatgctcttcgcgggcgggtttgaaccggccaaacggggtcaaagtcacggcggcctgggcatactcaaatgtgtcccacggcccaccatcggatcccgacgacggcccactgtgaactgcgccgctcgtggtgcattacccagaccacgatgagagaatggcggggaaatgggtgaattacggttggtgggcggtgtgctccgggtccttgtcgtggtcggtgcggtgttcgatgtggcggtgctaaacgccggtgcggctagtgccgacggcccggtccagctgaagagccgattgggcgatgtttgcctggacgcccc

SEQ ID NO: 707 - DNA, 401 bp, Mycobacterium tuberculosis H37Rv
gggttcaagtacggcctgccgatggacgccgacatggtcatggacgtgcggttcctgccgaacccgcactgggtggacgagttgcggccactgaccggccaacatccggccgtgcgcgactatgtgctgcaccggccgggcgcggctgagttcctcgagtcctaccatcggttgctatccctggttgtcgacggctaccgccgagaggggaagcgctatatgacaatcgccatcggctgtaccggtggtaagcatcgcagcgtcgcgatcgctgaagcactgatgggacttctgcgctccgatcagcaactgtcggtgcgggcgctgcaccgggatctgggtcgcgaatgaccgatggcatcgtcgcgctgggcggcggacacggcttgtatgcgacgctg

SEQ ID NO: 708 - DNA, 401 bp, Mycobacterium tuberculosis H37Rv
tgcggcccgccggttgacaccctacgttaccgccgtggtgaccgtcgccgatgacggtggctcgtcgggccggctgcgcagcgagctcgatgtggtgccgccgggcgatctgcgaatggccttggcggcgttggcatccgatagcccgcacggacgcctgtgggcaactattctgcagcacagattcggcggcagtggtgcgctggccggacatccgatcggcaatctgatgctagcgggcctgtccgaggtgctggccgatccggtcgcggctcttgacgaactcgggcgcatcctcggggtgaaaggcagggtgctgccgatgtgcccggtcgcgcttcagatcgaggccgatgtctccggtctggaggccgacccgcgcatgttccgcctgatccgtg

SEQ ID NO: 709 - DNA, 401 bp, Mycobacterium tuberculosis H37Rv
acagaagcgtgacgagctgcccgccaagccgttgatcgcgcagattccggtctccacccgcagcgaggaaacgaaggccgacgtcgggaaccaggtcagctcgatgaccgcgtcgctggcaacccatatcgaggatccggccaagcgcctggcggccatccacgagagcaccctcagcgccaaggaaatggctaaggcgccctccgcgcaccagatcatggggctgaccgagaccacgccaccgggtctgctgcagctggccgcccgggcctatacggccagcgggctgtcacacaacctggccccaatcaacctcgtcgtctccaatgtccccggtccacccttcccgctatatatggccggcgcgcggctggattcgctggtgcccctggggccgccgg

SEQ ID NO: 710 - DNA, 401 bp, Mycobacterium tuberculosis H37Rv
ggccgccatgggatttctgaagcccgatcttcccgacgtcgatcacgacacctggttgacccagccacgccggacacgattgcaggtcgtgacacgggactgggtagaacacggtttcggaacgccgtatgcggtgtacctgctctatctgaccaagattgcggtgtacgtcgccgccggcgccgcgatcatctcgctgaaccccggactgggcgggctgagccgcataggcgactggtggacacagccgatcgtgtaccagaaggtcatcgtcttcacgttgctgttcgaggttttgggttttggctgcggatccggcccgctgaccgggcggttttggccacccatcgggggcttcctttattggttgcggcccaacacaattcggctgcctgcttggc

SEQ ID NO: 711 - DNA, 401 bp, Mycobacterium tuberculosis H37Rv
tcatgggaaacctgttgcccgaaaagatttcgtttctgcccgccatgcgctactacgccggcaactgggccaccagcatctggtgcttccgaggtgatgcggaagccaccatggaaaccagcgtcgtgaaaagctctgcgctggtggtcaatcagctggccaagctctacgacggggccacggccgaaatcatgaccgacaaggtcgccgcattccgggccatgcacacccacggcagggcgctcaacggcctgctgccccgcgctctcgatgacgaagctcactaccgcatccgcgagggcgaaatcgtggccgggccactggtcgggtggaatttcggcgagggccatctgcacaacgagcagctggtggccgccgtgcagcggcggtgcaacttcgcc

SEQ ID NO: 712 - DNA, 401 bp, Mycobacterium tuberculosis H37Rv
ttatcggcggcgccaacgaccggctgcaggtcatcttccgcccgcgcgtggccgtcgatccgtatgcgatcggtgtgccgggtgtctatctgtgttcacagtccgcgccacccggtgccgggatccacggattgtgtggctaccacgccgccgaatcggcgctgaggtggctgcgcaagcgacgttgacgcaggtcatcgtcgagatcgacgttagcgcgacgtccactcgtgccgtagccaaaacgtgacggaggtttgatcgaattgctaaggcgcgcctgcacttccactcttcaatgcacctctaccatcactggtgcaactgtgtcgttgacagggaattggagccatgcgggcggtttttgggtgtgctattgccgtcgtcgggatcgctgggag

SEQ ID NO: 713 - DNA, 401 bp, Mycobacterium tuberculosis H37Rv
aacggcgggtaccggtaccggtgcgcccggtatcggtaccggtccgccggggattggtaccggtgcgcccggtatcggtaccggtgcgccagggattggtaccggtgcgccgatgggcaccggtgcagctgccggcactggcccaggcgcgacgaacggaacaccagccatgtcagtaagtgcggcactgcacgctcccgcggctgccggtccaccggcagccaccgggtcgccggcggctaccggcgcgtcgcccgccatgccctggatgcacgcgtagccacccgtcatcagcgggtcagccgccgcgtccgggcttaacgctatagcagctgcaaacaacccagcgccggcaattactttgatgttgaaccgattgacgatcgccatcagcgtcaact

SEQ ID NO: 714 - DNA, 401 bp, Mycobacterium tuberculosis H37Rv
tgctttccttgcgcgccattggcgccgccgatcccgtcgggcacaccgacgccgccaggtccgccggtgccgccgtcgccgccaaagccgggattgccgccaccttggctgggcccgccgtcaccgccgttgccgccggcgccgccgttaccgccggcgccggtgccgcctccgcctgccccacccgcggcgccgttgccgccgttgccgccgttgccggcttggcctttgccgtcgaggctttcgatatagccgccggtgccgccggtgccgcctgcgccgccagcgccgccggcgccggcgctgctgccattgccgatggtcaatgcgctggcgccgccggtgccaccgacgccgccgttgccgccggtaccgcctttgccgccgatcattgagctgcc

SEQ ID NO: 715 - DNA, 401 bp, Mycobacterium tuberculosis H37Rv
cgccgttgccggcttggcctttgccgtcgaggctttcgatatagccgccggtgccgccggtgccgcctgcgccgccagcgccgccggcgccggcgctgctgccattgccgatggtcaatgcgctggcgccgccggtgccaccgacgccgccgttgccgccggtaccgcctttgccgccgatcattgagctgccgccgccggtgccgccggcgccgccgtcgccgccggcgccgccggcgccggcgctgctgccgccgatgccagctgtgccgccagtaccaccggcgccgccggtgccgccgtcgccgccgatgccgccagcgcctagcgccgtgccgccgtcgccaccttggccagcggtgccgccgttgccgccggcgccgccattgccgaacagccgg

SEQ ID NO: 716 - DNA, 401 bp, Mycobacterium tuberculosis H37Rv
cagcggtgccgccgttgccgccggcgccgccattgccgaacagccggccaccagccccacccgcagcgccgttgccgccgtcgccgccacgggcgccgttggcaccgctgttaggactgtcgccggcaccgccggcgccgccgtccccgccggtcccaccggcgccgccggtgccgaacatcccagcagcaccaccggcatcaccgccaccgccgttaccgccagggctggcggggacgggggggaggccgccgccgccgtcggcgccgctggcgccagtaccgccgttgccgccggcgccgccgttgccgcttagccagccaccggctccaccggcgccgccggctccaccggccgcgccggttccggccgccgggctgtaaccggcaccgccggccccg

SEQ ID NO: 717 - DNA, 401 bp, Mycobacterium tuberculosis H37Rv
ccgccgttgccgcctctgccgccgtcaccgccatcgccctcgttggtgccgaggacgcccttggcgccggtgctgccggcgccgccagtcccgccgatgccaccgttgccgccgttggcgccggtgccgccgttaccgccgttacccccgtggccgccggggccgccgtttccgccgctggcagcgccgtggccgccgtgaccgccgttgccgccgtcgtgcaggatgctgccggccggccccgccttgcctgcggtggagccggtgccgccggggccgccggcaccggcgttgccggcgttgccgccgtcgccgcctcgcccgccgccgccgccggcgaaggcccctgctccctggccgttgccgccgttggccccgtcaccgggagcaccgccgtcgcc

SEQ ID NO: 718 - DNA, 401 bp, Mycobacterium tuberculosis H37Rv
gccggccccgccggccccgccggcgccaccgttgccgccggggttaccgtttggcccgttttcaccagggttggtggcgttggcactcatgccaccaaacgcgccgtcgccgccgcggccgccgttgccgcccgtgccggcgctgccgccgttgccgccattgccgccgtcgccgccgttgccgccgaccacttgggagttgccgccgttgccgccgtcgccgccgtcgccgccgctggttggagtgaagccgtgggcgcccttggcgcctggggtagagccggcgccaccgctaccgccctgcccgccggcgccggggttaccgccgttaccgccgtgaccgccgttaccatcgccgaaggcgaagttgccgttggcgccgttgccgccgtcaccggcga

SEQ ID NO: 719 - DNA, 401 bp, Mycobacterium tuberculosis H37Rv
aggccggtggcgccggtggcgccgttgccgccgttgccgcccttaccgccggcgccgccagcaccgccgtcgcctgcttgggctccgccgtcgccgcccttaccgccagcgccgccagctccgccgccaccgccgttagggtcgccgccagaaggcggggcaccgggggcgccgttgccgccggcacctccggcgccgccattgccgaccagcccgccggccccgccggccccgccgttaccgccggctttgccgcccgatgagaagtgggcgccgttgccgccggccccgccgttgccgccgctggtggggctggccccggccgcgccgtgggcaccgatcgtggagccggctccgccggtgcctccggccccgccggcgccggggtcaccgccgttatc

SEQ ID NO: 720 - DNA, 401 bp, Mycobacterium tuberculosis H37Rv
tgaacgttcgcgggcgcgtcgcgccgcgccgagtgactggtagggcaatgagcaccctgctggcctacctggcgttaaccaagccgcgagtcatcgagctgctgttggtcaccgcgataccggcgatgctgctggccgaccgcggcgccattcatccgctgctcatgctcaacacgctcgtcggcgggatgatggccgccgccggcgccaacacgctcaactgcgtcgccgacgccgatatcgacaaggtgatgaagcgaaccgcgcgccggcccttggcgcgggaagcggtgccgacccgaaacgcgttggcactcgggttgacgttgacggtgatctcgttcttctggctatggtgcgccacgaacctgctggcgggggtgctggccctggtcaccgtc

SEQ ID NO: 721 - DNA, 401 bp, Mycobacterium tuberculosis H37Rv
gaggggttccggcgcagccaccgagacgcactcaccaccgctcggatgattatccggctggaatcaccgcaccgagtcgcctttttcaccgacgtcgagatggtcgcgttgctcaccgaaaacgccgagggtgccgacgacttcatccaacgcaccctcggaaacctcgagtcggccagcccggctctgaaaacgacgctattgaccttcatcaaccagcagtgcaacgcttctcgggccgcgagacttctcttcacccaccgcaacaccttgatgaaccgactcgagaccgcgcaacgacttctgccccgccctctcgccgacaccaccattcacgtcgccgtcgcactcgaagcccagcagtggcgggagaagccaaccagcgatcctccggcaaagaa

SEQ ID NO: 722 - DNA, 401 bp, Mycobacterium tuberculosis H37Rv
aacgcttctcgggccgcgagacttctcttcacccaccgcaacaccttgatgaaccgactcgagaccgcgcaacgacttctgccccgccctctcgccgacaccaccattcacgtcgccgtcgcactcgaagcccagcagtggcgggagaagccaaccagcgatcctccggcaaagaaagagtcgaatggcaccaagatgcgttagcaagacagcgcagcacagaccgctacgctacggcagcagcacgaccgagccgaccgtcttgcgagcctccaggtcctgatgggcgcgcaaggcgtcggccagcgggtaacgtccgccgaccgccacggtgatcgcttcgctgccgatcgcgtcgaacagctcagcggcccgccagctgaactcctcgccggtgcggg

SEQ ID NO: 723 - DNA, 401 bp, Mycobacterium tuberculosis H37Rv
ttcaccgggtacaccgacttcagtaggtaatgcgccgtcaggcccttcagcagcgccgaagccgctacctcagacgtgacgtcgtcggggaccttggcggtcagagatgctggcgctgtgcagaattcggcgtaggcgccgttggctgaggcgctgaccacgcggtcgccgacgctgatggcggtgtcggctgcggtaacccctgggccgacggcctccaccgtgccgcatacctcggagccgatgacgaacgggagttcgcgcggatattgcccggagcggaagtaggtgtcgatgaagttgacaccgatggcctcggccttgatcaggagctcgccgtggccgggttgaggttgcggctggtcgacgtggcgtaagacgcctggcccgccggtttcggt

SEQ ID NO: 724 - DNA, 401 bp, Mycobacterium tuberculosis H37Rv
ccagcaccattgcccggtatcccatgtcgccgaggaattccccgaattgtgcgaaaccgagcagcaggccatggccgaggtgctcggcacccacgtccagcggttggcgaccatcgtcaacggagactgcgcctgcaccacccacgtacccctgtcgccggcgcccagcccgcgcccacccgccaccagcaccgaaggagcgtcccgatgacactcaccccagaggccagcaagagcgttgcccagcccccgacccaggctcccctgacccaggaagaggcgatcgcgtcgctgggccggtacggctacggctgggcggactccgacgtcgcgggtgccaacgcgcagcgcgggctttccgaggcggtggtccgcgacatctccgcgaagaagaacgagcc

SEQ ID NO: 725 - DNA, 401 bp, Mycobacterium tuberculosis H37Rv
caccacccacgtacccctgtcgccggcgcccagcccgcgcccacccgccaccagcaccgaaggagcgtcccgatgacactcaccccagaggccagcaagagcgttgcccagcccccgacccaggctcccctgacccaggaagaggcgatcgcgtcgctgggccggtacggctacggctgggcggactccgacgtcgcgggtgccaacgcgcagcgcgggctttccgaggcggtggtccgcgacatctccgcgaagaagaacgagcccgattggatgctgcagtcgcggctgaaggcgctgcgcattttcgaccgcaagcccattccgaagtggggctccaacctcgatggcatcgatttcgacaacatcaagtacttcgtgcgctccaccgagaagcaggc

SEQ ID NO: 726 - DNA, 401 bp, Mycobacterium tuberculosis H37Rv
ccgggtaccgttcaacggtgagtttggtcctcgtcgaacacccgcggcccgagatcgcgcagattaccctcaaccggccggagcggatgaactccatggcattcgatgtcatggtgccgctcaaagaggccttagcgcaggtcagctacgacaactcggtgcgggtggtggtgctgaccggcgcgggtcgagggttttctccgggtgcggatcacaagtcggcgggggtggtgccgcacgtcgagaacttgactcggcccacctacgcgctgcgttcgatggagctcctcgatgacgtcatcttaatgctgcgacggctgcaccagccggtgatcgccgcggtcaacggccccgccatcggtggtgggctgtgcctggcactggctgcagacattcgggtg

SEQ ID NO: 727 - DNA, 401 bp, Mycobacterium tuberculosis H37Rv
gttgaccaaacgtacgctgtggagtggactggacgccgccagtctggaggcgcacatgcaggccgagggcttggggcagctcttcgtccggctgctcaccgccaacttcgaagaagcggttgccgcacgggccgagcagcgggcgccggtgttcaccgatgacacgtaacagcgcccaagacaaccgacgaccagggagcgaatgtgatcacagctacggacctcgaggtccgcgctggcgcgcgcatcctgctcgcacccgacggccccgacctgcgtgtgcagcccggcgatcgtatcgggctggtcggacgtaacggtgccggcaagaccaccacgctgcgcattctggcgggggaggtcgaaccctatgccgggtcggttacccgtgccggcgaaat

SEQ ID NO: 728 - DNA, 401 bp, Mycobacterium tuberculosis H37Rv
ttgaccaaacgtacgctgtggagtggactggacgccgccagtctggaggcgcacatgcaggccgagggcttggggcagctcttcgtccggctgctcaccgccaacttcgaagaagcggttgccgcacgggccgagcagcgggcgccggtgttcaccgatgacacgtaacagcgcccaagacaaccgacgaccagggagcgaatgtgatcacagctacggacctcgaggtccgcgctggcgcgcgcatcctgctcgcacccgacggccccgacctgcgtgtgcagcccggcgatcgtatcgggctggtcggacgtaacggtgccggcaagaccaccacgctgcgcattctggcgggggaggtcgaaccctatgccgggtcggttacccgtgccggcgaaatc

SEQ ID NO: 729 - DNA, 401 bp, Mycobacterium tuberculosis H37Rv
aacggtctgggcaagacgtatggctcgctggaagtcttcaccggtgtcgacttggccatcgaccgcggctcgcgggtggtcatactcggactcaacggtgccggcaagaccacgctgctgcgattgctggccggtgtcgagcagcccgacaccggagtgctggaacccggatacggtttacggatcggctatttcgcgcaggagcacgacacgctcgacaacgatgccaccgtttgggagaacgtccggcacgcggcaccggatgccggcgaacaggacctgcgcggcctgctgggtgcgttcatgttcaccggtccgcagctcgagcagccggccggcacgctctccggcggtgagaagacccggctcgcgctggccggcttggtggcctccaccgcgaa

SEQ ID NO: 730 - DNA, 401 bp, Mycobacterium tuberculosis H37Rv
cctgggatcgacggagggtaccgatgcggaagtcaaagaagacgcgcgatcagctgctgcgcgagttgcgcaacgcctacgagggcggggccagtatccgcaacctggcggccaccaccggccggtcgtacggatctattcacagcatgctgcgcgagtcaggcaccacgatgcgcggccgcggcggccccaatcgccgttcccggccgcgttgatccgccgattgtgaatctgacgacgcgacagcggcgtgtcgcgtcgtcagattcacagtcagcgcatgtcaagaccgacgcaccgagttctccaccaggtcgaggacggcggctagccgctgcgggtcttcgccggaggccagccgggccagcaatccgtcgagcaccaggtccaggtagcaccgc

SEQ ID NO: 731 - DNA, 401 bp, Mycobacterium tuberculosis H37Rv
ggcaccacgatgcgcggccgcggcggccccaatcgccgttcccggccgcgttgatccgccgattgtgaatctgacgacgcgacagcggcgtgtcgcgtcgtcagattcacagtcagcgcatgtcaagaccgacgcaccgagttctccaccaggtcgaggacggcggctagccgctgcgggtcttcgccggaggccagccgggccagcaatccgtcgagcaccaggtccaggtagcaccgcaaaacgtcgctaggcacatcgtcacgcactcggttagcctgcttttgccggcgcagccgatcggtggtcgccgccgccaattccgcggagcgctccgcccagccgcggctgaagtcagggtcgttgcgcagcttgcgtgcgatctccaacctggtggccag

SEQ ID NO: 732 - DNA, 401 bp, Mycobacterium tuberculosis H37Rv
ggactggtcgcgctgtacatcctgatgcagctggcgcgccagcggcgaatgctgcggttcgccaacatggagttgctggagagcgtcgcacccaagcggccatcccgctggcggcatgtcccggcgatcctgctggtgttatcgctgctgctgttcaccatcgcgatggccggtccgacgcatgacgtccggattccccgcaaccgcgcggtggtgatgttggtgatcgacgtgtcgcagtcgatgcgcgccaccgacgtcgagcccagccggatggtggccgcgcaggaggctgccaagcagttcgccgacgagttgaccccgggcatcaatctgggattgattgcctacgcgggcacggcgacggtcctggtgtcgccgacgaccaaccgggaggcgac

SEQ ID NO: 733 - DNA, 401 bp, Mycobacterium tuberculosis H37Rv
ccagctctccggtggaaattcctacaatgcggcgactttggccgagctgagggccgtttactcgtcgctgcagcagcagatcggctacgagaccatcaagggtgacgccagcgtcggctggttgcggttgggtgcgctggcgctggcgttggcggcgctagcggcgctgctcatcaaccggcggttgccgacttagcttctcccgcggccccggcagcccgcgagcgtaacctggctgcgatttccggcgcggattttcgcagtgcggttacgctcggaaagcgcgggcctcgcccacgcggcggatgatgtcagcggggtggtcctcggcgacgacccggaccacgatccacccgtagcggtgctggactttctcgtgccggaggatgtctttccggtag

SEQ ID NO: 734 - DNA, 401 bp, Mycobacterium tuberculosis H37Rv
gtgacgacggtatgcaccagcaaaaatgccagcgggaaccacgcgcccagtgacttggcccagtcgcgcaattccaccgcagtgggcaccggaaccagcagcgcgaccactaccagtactgtgattcccaccactgttcccacgatgcgcggcagcgacgcctgacgcgcgaccgcgccgagcgaggtggcgataccgtgcacggtttcggtggtgttgcagatggcgggagccgtcacgtcttcggagcgtacggggtcaacatgaataactcgtttccccaggctggcgtttcgtcacactccggccgcgattgccgcacctgggcgtctatatgggcgtcccgatcaactagccttattagttaagtgacaatcccgaagcaagcccaagcaacatcg

SEQ ID NO: 735 - DNA, 401 bp, Mycobacterium tuberculosis H37Rv
tatcacatccaagaagccggtgccacggcggatttggagctggcctacaccctggccgacggcgtcgactacatcagggcgggcctgaacgccggcctggacatcgacagcttcgcgccccggctatcgttcttctggggcatcgggatgaatttctttatggaggtcgccaaactgcgggccggccggttgctgtggagtgagctggtcgcacagttcgcgcccaagagcgccaaatccctttcgctgcgtacacattcgcaaacatcggggtggtcactgaccgcccaggatgtgttcaacaacgtggcgcgcacatgcatcgaggcgatggccgccacccaggggcacacccagtcgctgcacaccaacgccctggacgaggcgctggcgctgcccac

SEQ ID NO: 736 - DNA, 401 bp, Mycobacterium tuberculosis H37Rv
gacgcgttggcgcaggtgggcaggcccgacatcatgatcgtggtcggtggtgtcatcccgccgggcgacttcgacgagctgtacgccgccggggccaccgccattttcccgccggggacggtgattgccgacgcggcgattgacctgctgcacaggctggccgagcggctggggtacacgctggattagcgagaggcccgcggtgccgtttctggttgcattatccggtatcatctcgggcgtgcgtgatcattcgatgaccgtgcggctcgaccagcaaactcgccagcgcctgcaagacattgtgaaaggcggataccggagcgctaatgcggcgatcgtcgacgccatcaacaagcgctgggaggcgctacacgatgagcaactcgacgccgcctacg

SEQ ID NO: 737 - DNA, 401 bp, Mycobacterium tuberculosis H37Rv
gcggtgtatctcgacgggcagccggtcgtcgacgtgtggaaggggtgggctgatcgggccggatgggtgccgtggtcggcggattccgcgccgatggtgttctcggcgaccaagggcatgacggccacggtcatccaccggctggccgaccgggggctgatcgactacgaagctcccgttgccgagtattggccggcgtttggcgccaacggcaaggcaaccctgacggttcgtgacgtgatgcgacaccaggccggcctgtccggattgcgtggcgcgacgcagcaagacttgctggatcacgtcgtgatggaagagcggctggcggcggcggtgcccgggcggctgctgggcaaatccgcctaccacgcgctgacgttcggttggttgatgtcgggcct

SEQ ID NO: 738 - DNA, 401 bp, Mycobacterium tuberculosis H37Rv
ccaggcggaagccgactttcatagtcacctggaagtgcgcgaccgctccgtcgaccaggtggcctcgaattgactgtacttcgaaccagtccagcgcgcgcatggtctgcgcagctcgggccagaccgccctggattgccgcgtcgacgccgtcgggcgaggtcccgacgatctcgatcactcggtaggtgtgattgctcatcgtgtcccctcacattcttttacccgctcttaccggccagcggcacaccagaatagtccggtgccatcgggggagccctctacggccggtcactttgagcacttgccgcgcggcagcttcggccggattctctccgtcctcaatgccgctgccgaccatcatccacgtgagttgctcgtcgtcgggattgcgaccttcg

SEQ ID NO: 739 - DNA, 401 bp, Mycobacterium tuberculosis H37Rv
tccgacaatagcgcggcctgtaggccgtacgtcgtccgcgatgcgggagtatacagaatgtggttttgcgctcgcggtgcgaaatatcggatttactgcgctacatcggaggatggtttgacttggcggcaactcggcaaagatgagggcatcgacgtttcgccagatagctgggactcggatatgatcgagtatccttgcgtgttcgatcacaggggacagcgctttatgctttattcgggcgatggctacggtcgcaccgggttcggtttggcggtgctggagaactgatcagggctgacaatagatgtttagcggctgatgatgcgcttcccgctcgaataggctgagaccattattgccgcggtagcgatgatttcccggattatcgtcgtcgccgc

SEQ ID NO: 740 - DNA, 401 bp, Mycobacterium tuberculosis H37Rv
tgcgcgcaacgtcaggatgcgcgtgagcgcctcgacaacgcggctctgatctacctcctgaagtccaacccacatcggcagacggattaggcgggaagccacgtcgttggtgacggtcaggttgccattggtgcggccgtagcgacgcccggccggcgaatcgtgaagcggcacgtaatgaaagaccgcgcctataccttcgctcgtcagacgcgccagcacctcctcccgatcggcgctgggcgctagtaacacgtagtacatgtgggcgttgtgagagcagccctgtgggatgatcggacggcgcaggagcccccgctgttccaatgattcgaagctttcatgataccggttccataggtccaatcggatacgcgtgatccgctcggcttcctcgaact

SEQ ID NO: 741 - DNA, 401 bp, Mycobacterium tuberculosis H37Rv
ccggttccataggtccaatcggatacgcgtgatccgctcggcttcctcgaactgagcccatagaaaggcagcgactaattcgctgggcaaataggaagaccctttgtcctgccacgtatatttgtcgacctcgttgcgaaggaagcggctgcgattggtgcccttttccctgagaatctctgcccggagcaggaagtcttatgagttgacaagcagggcgccgccttcgccggaaatcacattcttggtctcgtgaaatgagagcgctcccaggtcgccgatgctgccgagcgcccgcccacgatacgacgccatcgcgccttgggccgcgtcttcgaccaccgccaggttgtggtgcgtggcgatcttcatgatcgcgtccatctcgcaggccacgccgg

SEQ ID NO: 742 - DNA, 401 bp, Mycobacterium tuberculosis H37Rv
gatacgacgatatgagacgctagaaaacagtgatcgtgaatcgtcgagtgatggccgatatgattgccgctccacaatgtgacgttgttgccaatcgatacgaatggctggatagtgttgtcttcaagcaggaagacattttcaccgatccgcccatcgttcaagacggtagcgtgggagctcacatagctggcgagttcgtagccgagagccttagcggcaagatatttttccttccgcacaccgttcagtttggcgtaggccagcgccacgaacatcgcgtgggactccggcggaaagcgttgtgcgacctcgtcgaaggccactaaaggcaggccgcaaaactcggacacgcttgcatagtctcggtcgactgtgaacgcgacgacctcatattccga

SEQ ID NO: 743 - DNA, 401 bp, Mycobacterium tuberculosis H37Rv
gatatctaccagctcgtcgatgtggacttctggcttcggttgatgctgaggtcggcggtctgcttcgttccgcacgagctctcggtgcgccgtcacacggcggcgacggagaccacacgggtgatggcgactcggcgcaacgtgctggaccgacagcgcattctcacctggttgatcgtggacccgttgtcgcccaacagcgttcgcagcgccgcggcgctgtggtggatacccgcatggctggccatgatcgtggaggtggccgtgctcggaccgcagcggcggacgcacttgaaggctttggcgccggccccattccgcgagttcgcccacgcccggcgtcaactgccgatggctgactagcagtcgcactctgcctggccgtcgtcggagccacagac

SEQ ID NO: 744 - DNA, 401 bp, Mycobacterium tuberculosis H37Rv
gacagcgcattctcacctggttgatcgtggacccgttgtcgcccaacagcgttcgcagcgccgcggcgctgtggtggatacccgcatggctggccatgatcgtggaggtggccgtgctcggaccgcagcggcggacgcacttgaaggctttggcgccggccccattccgcgagttcgcccacgcccggcgtcaactgccgatggctgactagcagtcgcactctgcctggccgtcgtcggagccacagacaattccaacccatttggcctggcggccaagatgacatttttacaaggtaaggctagccttaagcgtccgcgtatccaggacctcgggtctgttgcgttgtggttgcctcgcatgcgacggagtgctctgcgccaacggcccaggtcgtccg

SEQ ID NO: 745 - DNA, 401 bp, Mycobacterium tuberculosis H37Rv
tcttcctggtgtgctgcgtgaacgcgccagttttcagcccaacgacaaagcgctcacctttatcgattacgagcggtcctgggatggtgttgaagaaactctgacgtggtcgcagttatatcggcgaacgcttaacctcgccgcacagctaagagaacatgggtcgaccggcgatcgggcattaattctggcgccacaaagcctcgactatgtcgttagctttattgcctcgctgcaggccggaattgtcgcggttccgctttcgattccccagggtggtgcccacgacgagcgcaccgtttccgtgttcgccgataccgcaccggcgatcgttctcacggcgtcctcggtcgtcgacaatgtcgtcgaatacgtccagccgcagcccggccaaaacgcac

SEQ ID NO: 746 - DNA, 401 bp, Mycobacterium tuberculosis H37Rv
gggatcgtcacaccagtagcaccagcccctggaggggcaacaggggaaaactgagttgagcgccaaccgtgcgcactgaggctcaggtgctcagcttcgcgtcgggctttgaccccgcgtgaccgactgcgggttcgccgatagacgtgtcatcccaacggtcgtagctcggtaggccggcaagaccgaacagcggcagcgagtggccgagtagatggtcgacgggttctttaccgatgtgggcgccgtcgccgttgggtttcgacacgccatccacgacatcgtaggccggcatggcggcatagccgaacagcggaagcgaatgtctgcgcaggtggtcgatcaggtactccccgttgccttcggctaggtcagcgggcttgccgttgggaaccgacttg

SEQ ID NO: 747 - DNA, 401 bp, Mycobacterium tuberculosis H37Rv
gtcggtggcctttcacccgccgcagccaccgatcggctttggtcggcggcgtggatgggtcgcgtcccagctcggacggccaccagtttgcccggccaatcatcgtggtcaaggccggcaccgtgaccgtgcggaccaggaaggtgtccagcacgatcccgatgccgatggtgaaaccggcctgagccatcgtgttgatgctcgcgcccaccagaccgaacatcgacgcggcgaagatgagacccgccgaggtgataacaccaccggtggagcccacggttcggatgacgccgatgcgtataccgtgtggtgattcgtcgcggatgcgtgaaatgagcagcatgttgtagtcagcgccgatggcaaccaataatatgaaggacagtcccggcaggctccaa

SEQ ID NO: 748 - DNA, 341 bp, Mycobacterium tuberculosis H37Rv
gcggttcatcgcctcgtatcctttgacgctttcgacgtgctgcggcaccgtcttgagatcgtcgtagttgaatcggatcagcagcgtgcagccggccagggcgaccagcacaatgagactgccgaccaggtggatggtggaccgacgcacgatgcgaacacccgaacgccgccacattcgactggtcaggtcgcgtcgcggcttgatccagccccgccgtccggtgagtgtcaggatggcgggcagcagggtgaccgcacccagcagcgacaccgtgatggcaaccgcaattgccgggcccaccgccgaaaacacttccagtttggtgaacaccatcgcca

SEQ ID NO: 749 - DNA, 401 bp, Mycobacterium tuberculosis H37Rv
ggcgtaatcggttcccgccccgatcatgaccgcgctcataaagacgatcgcctgcatgttcacggccaggccgaactcggcgagcccggacaacgtgccctgcgcagtgaccaccgacgctccgatggtggccagcggcaccagcatggtcaccaggttccgatagacgaggatcaggatgatcagcacgctgaccgcggtgccgatctcgatgatccgcacatctttctcgccgagctccgtcaggtcggcgaccgtggcgatcggaccgctgaggtggacggtcaggctggttcccgcgactgtttgcttgacgatcgcggcgacgcgtttgaacgccgcttgtgtctcaggcgacgcggcatcgcccgcgaacgtgatgggcaggttccaagccttgt

SEQ ID NO: 750 - DNA, 401 bp, Mycobacterium tuberculosis H37Rv
tccaccatcacggccatcgactggctgtattggcgcatgacgaaaggtgttgaggacgcgcagcggcgtgaactgggcctgccgaaggcgtcaactcccgcgccgcggcgaatggccgtacgcgggtcgctggagatccaagcctacgacgcgctttgcttcccggggctggcagcggaatggggcggccgacgcccgttcgtcggcgcgttgacgatggaatcggcgaccgacgcggacgacgaggtcgcttcatggatcgctgccgatacaccgccgatttatttcggctttggcagcatgccgatcggatccctggccgaccgggtcgccatgatcagtgcggcctgcgcggagttgggcgagcgcgcgttgatttgctcgggacccagcgatgcgac

SEQ ID NO: 751 - DNA, 401 bp, Mycobacterium tuberculosis H37Rv
gccgacccggtcaccgaccttgagttcgctgaccccgggcccgaccgcgctcaccaccccggcgaaatcggtgcccagctgcggctgtcgcccgtcgagggtttggtagcggccgaaggtgaccagcacgtcggcgaagttgatgctggacgcggtgacggcgacctcgatctctcccgggcccggcgggacccggtcgaacgcggcgaactccaaggtttgcaggtcaccgggagtacggatctgtaggcgcatgccggcctcggcgtggtcgacgacggtggtttgccgctcctcggggcgcagcggggctgggcacaaccgggcggtgtaccactggtcgttgcgccaggcggtctcatcctcgccgctggccgccagcagctgacgcgccaccgact

SEQ ID NO: 752 - DNA, 401 bp, Mycobacterium tuberculosis H37Rv
gacctcgggggcggtcatggcttcggtcaccgagaagccggattccgcggcgatcagtggttcgatcgcggcgatggtggcggcgaataccggttcggtggccagcaggtcggcgcccatgcccgcccattgcgagccttgcccggagaacacccagaccggtccgcggtcgtcttggccgaccgcgggtgggtaggggggttcgccggtggcgacttcccgcagcgcctcggtcagctccgcggtggtggcggccagtacggcggtgcgcaccggccggtgtccgcgccggcgggccagggtgtaggccagatccgccggcgccagctcgggtccttgggcgtcgacccaatcggccagccgcgcggcggtctgccgcagcgcgtcctgcgagctggccg

SEQ ID NO: 753 - DNA, 401 bp, Mycobacterium tuberculosis H37Rv
ccgcagcaccaaacgcacccaccgacccccacgcttcacgccaaccctttagttcattggcgtgaacagcagcgtagccggttgccccgatatatgtggaaaaatcgttcggacgtacaaaaaaagttcctgacgctggcgtcaactcgaaactgcctcggaagtcatgattgattcatcagtcaatattaaagtcgcagctcacaactataatacgccggtgcagcggacaattgcggaagcgccggacgcctcgcggtccgatgtcgcctttccctgcctcgtcgtcaatatctgatggtggacgaccgcccgtgccggaccggcttaggtagccagccgggcttcgcgccacgcaatttgcctagtcgtgaaagacggattgccgaagtgtcgaaggc

SEQ ID NO: 754 - DNA, 401 bp, Mycobacterium tuberculosis H37Rv
cgggcggagcagcggtggggcgtgtcggccggcgaccgagtagccgtcgaggtattccagtcgtgtcggcagtgcgctaactgtcgtggcggcgagtaccggcgttgtgtacggcatggcctcgctgacatgtacgggttcatcccggttgaccgagagcctggcctgtggggcggttacgccgaatatcagtacctggcgccggattcgatggtgttgcgggtggccggtgacctcagcccggaagtggccaccttgttcaacccgctgggggcgggaatacgttggggagtaacgattcccgaaaccaaaccgggcgacgtcgtggcggtgctgggtccaggaatccgggggctgtgcgccgccgcggcggcaaaaggggccggtgccgggttcgtgat

SEQ ID NO: 755 - DNA, 401 bp, Mycobacterium tuberculosis H37Rv
ttggcgacgagcttaacgtgaagcaggtcgaactgaccgatgccatcgacacctatggccgattcgagctcacggtcaacgcccgggtagccggaccacggctgggcaaagatgtgcaggccgccatcaaggcggtcaaggccggcgacggcgtcataaacccggacggcaccttgttggcgggccccgcggtgctgacgcccgacgagtacaactcccggctggtggccgccgacccggagtccaccgcggcgttgcccgacggcgccgggctggtcgttctggatggcaccgtcactgccgaactcgaagccgagggctgggccaaagatcgcatccgcgaactgcaagagctgcgtaagtcgaccgggctggacgtttccgaccgcatccgggtggtg

SEQ ID NO: 756 - DNA, 401 bp, Mycobacterium tuberculosis H37Rv
atcccagcgatcctcgacggcgatgtccccaacgatgcccaagtgcgggtgggcggcatcctggcgtcggtgaaccggagggtcaacaaaaacggaatgccatgggcttcagcgcaattggaggatctcacgggcggcatcgaggtgatgttcttcccgcacacctactccagctatggtgccgacatcgtcgacgatgccgtcgtgctggtcaacgccaaggtggcggtccgtgacgaccgcatcgcattgatcgccaatgacctcacagtgcccgacttttccaacgccgaggtggagcggccgctggcggtcagcttgcccacccggcagtgcacctttgacaaggtgagtgcgctcaaacaggtgttggcgcgccaccccggcacctcgcaggtgca

SEQ ID NO: 757 - DNA, 401 bp, Mycobacterium tuberculosis H37Rv
ccgcgatggccggggcgttttgccccaacagattcgaggccaccaaggagcgcaaccgacctcgattggcgctcaccgcgcccggatgcaccgtcgccgccagcgccgcctcgaacgccgataccgccgcctgggcttgacccgccgcctgctcagcctgcgctgcggccgtggtcagccagcgagcataggacgcggccacgcctgtcatggccgctgacgccggaccttgccaggacccggtggccaactgcgaggtcaccgccgaaaatgaggccgccgccgaacccaaatcgccggccagcccggtccaggccgacgccgccgccaacatcggtcccggcccggcaccagcgaacatcagcgccgaattgatctccggcggcaacaccgaaaaattc

SEQ ID NO: 758 - DNA, 401 bp, Mycobacterium tuberculosis H37Rv
gcccggcaccagcgaacatcagcgccgaattgatctccggcggcaacaccgaaaaattcatcacaaccatcccgtcagccggccacacccaccgggcttcacggcgctgtctggccccaaccgcagcgaagcctacgaaaaagccgggcgcttcggacgggcgcaggttaaatccaggtaacgcgtgacgaatctcgcgaggagcctccttgcggccatgggccgccacgggtctcggtggtcgcggccccgtgcttccgcgtccttcgattgtggacgtacgctcaccgatgtgacctgggccatactgatccgctgtcaaggagaacggaaatgaccacaacagagcgcccgacaaccatgtgcgaggcgttccagcgcaccgccgtcatggacccgga

SEQ ID NO: 759 - DNA, 401 bp, Mycobacterium tuberculosis H37Rv
catcgtctgcgtcgatggcgcgcccccggcacgctctcgctgacggatttgtacgcggccgcctccggcgacttcttcgacttcgagtcgacgtggcgtgccgtacaacccgaggacattgtcaccctcatctacacgtccggcacaacgggaaaccccaagggtgtggagatgacccacgccaacctgctgttcgaggggtatgccatcgacgaggtgctcggaatccggtttggcgatcgggtgacgtccttcctgccatcggcgcacatcgccgatcggatgaccgggctgtacctgcaggagatgttcggcacccaggtcaccgcggtggccgacgcgcgcacgatcgcagccgcgctccccgacgtgcggccaaccgtgtggggggccgttccccg

SEQ ID NO: 760 - DNA, 401 bp, Mycobacterium tuberculosis H37Rv
aaccgtgtggggggccgttccccgggtttgggaaaagcttaaggccggaatcgaattcaccgtcgctcgtgagaccgacgagatgaagcggcaggcgttggcgtgggcgatgtcggtggctggcaaacgcgccaacgccctgctcgcaggtgaatctatgtcggatcagctggtcgccgaatgggccaaagccgacgagttggtgttgtccaagttgcgcgagcggctgggcttcggcgagctgcggtgggccctgtccggagcggcgccgatccccaaggagacgctcgcgttcttcgcaggtatcggcatcccaatcgccgagatttggggaatgtcggagctgagctgcgttgccaccgccagccatccccgcgacgggcggctgggcaccgtcggaa

SEQ ID NO: 761 - DNA, 401 bp, Mycobacterium tuberculosis H37Rv
ctactggcgatggtgcgcaacccgatcaccaagcttgttgtgctggtcctggtggtactggccctgttccatgcggcgcaccggttccggttcgtgctcgaccatgggctgcaactgggccggttcgaccgagtgatcgccctgtggtgttacggcatggccgtgttgggctcggcgacggcgggttggatgttgctcactatgtaaagtcgctggccgggcgctttggccgccggcacggtacggtacggacctgtaccaccacaacggttctatggtaggcgctgtgacccagatagcggatcggcctacagacccctcgccctggtcgccgcgagagaccgagttactggcggtgacactacggctgctgcaggagcacggttatgaccggctaacag

SEQ ID NO: 762 - DNA, 401 bp, Mycobacterium tuberculosis H37Rv
ggcgtggaagtcgcgcatccatcgcagcgcgcagtcgatgatatagtggcgaacctcgtcggagtcggcgccggcgatattgatgccgtccccccacgggttgctggccgacgacaggtacgggccgaatcgcggcaggtagttgcccgatgggccgagatggttgaacaccgcgtcgatcaacacgcccaaacgacgggcatggcatgcgtcgatgaaccggaccagaccgtcggggccgccgtagggttcgtgcacgctgtaccacagcacaccgtcatatccccaaccgcgggttccggcaaaggaattgaccggcatcagctcgacgaagtcgattccgagatcgaccaggtaatccagcttttcgatggcggcgtcgaacgtgccagccgtggtga

SEQ ID NO: 763 - DNA, 401 bp, Mycobacterium tuberculosis H37Rv
tcaacatggaaacgaaggggccgatgacggctgtggcgatggccgcaccgatccctccccacatcaccgggtagatgtaatagttgacgccgaacggtaccagcgggcaagcatccggcgggcacacgttgtcggtgaaggcgaagagccgtgatggccagctagtcatcgtgaccatgaccagaaatactgccaatatcgctacggtacataccacgtcccagggcgctatccgcagcgtgagtacccgtgggggtgtccgctcgtcgggctcgtctagagccgaccgggattcggtgccagcatcgggctgagtgtcttcaggctgattcggcggtgccatgcatgcatgctccccgatggcagaggttttggcgaccgttactgggatgggccgtggc

SEQ ID NO: 764 - DNA, 401 bp, Mycobacterium tuberculosis H37Rv
tcagtgactcttagctgcgagtcggtaaaccggtacaacgccgccgggcggccaccgctgcggccggactgcgcgatggttccggtttgggtgatgactctgcgacgggccagtacccgctgcaggttggttgcgtcgacctggtagcccagtgcggcgccgtagatgtcgcgcagcgttgagagcgcgaattcttttggggccaaagcgaatccgatgtttgtataggacatcttggcaatcagccgggtgcgggcatgggtcaccatcggaccgtgatcgaacgccattggcggcaaggaactcaccgggtgccagcgggtgtctgctggcagctcgggggtggcgggggagggcaccacccccaggtaggtcgacgcgatcatccggatgcctggcag

SEQ ID NO: 765 - DNA, 401 bp, Mycobacterium tuberculosis H37Rv
gcggtgtgctgatggggttatccgactgggagctggctgcggctcgagcagcaatcgcgcgtgggctcgacgaggacctccggtacggcccggatgtcaccacattggcgacggtgcctgccagtgcgacgaccaccgcatcgctggtgacccgggaggccggtgtggttgccggattggatgtcgcgctgctgacgctgaacgaagtcctgggcaccaacggttatcgggtgctcgaccgcgtcgaggacggcgcccgggtgccgccgggagaggcacttatgacgctggaagcccaaacgcgcggattgttgaccgccgagcgcaccatgttgaacctggtcggtcacctgtcgggaatcgccaccgcgacggccgcgtgggtcgatgctgtgcgcggg

SEQ ID NO: 766 - DNA, 401 bp, Mycobacterium tuberculosis H37Rv
gctatcctcgccgatcacaccgccgacccggtgcatgtggccgccgacctgattagccaggccgaacacgacgagttggctgccagcgtgctggtcactccgagtgaggacctggccgatgccaccgacgccgaactggctggccagctgcagactacggtgcaccgcgaacgggtgacggccgcgctgaccggacgccaatcggcgatcgtcctggtcgacgacgtggacgccgccgtcttggtggtgaacgcttacgccgctgagcatttggagattcagaccgccgatgccccgcaggttgccagccggatccgctcggcgggagccattttcgtcggcccgtggtccccggtgagcctcggcgactactgcgcgggatccaaccatgtactgccgac

SEQ ID NO: 767 - DNA, 401 bp, Mycobacterium tuberculosis H37Rv
gattcgttggttgccccgctggttgaacaggcgtcggcgatcctggatgccgcaacggcgctctttctcgtcggtcatcgcgccgattcagcggtccgcaagaagggtaacgacttcgccaccgaagtcgatctagcgatcgagcggcaggttgtcgcagcgctggtggcggccaccggcatcgaggtgcacggcgaggagttcggcggcccggcagtcgactcgcggtgggtgtgggtactggaccccatcgacggcacaatcaactacgccgccggatcgccgttggctgcgatcctgttgggcctgctgcacgacggagttccggtggccggcttgacctggatgccattcaccgacccacgctataccgccgtggcgggtggtccgctgatcaagaa

SEQ ID NO: 768 - DNA, 401 bp, Mycobacterium tuberculosis H37Rv
tcgtcggtcatcgcgccgattcagcggtccgcaagaagggtaacgacttcgccaccgaagtcgatctagcgatcgagcggcaggttgtcgcagcgctggtggcggccaccggcatcgaggtgcacggcgaggagttcggcggcccggcagtcgactcgcggtgggtgtgggtactggaccccatcgacggcacaatcaactacgccgccggatcgccgttggctgcgatcctgttgggcctgctgcacgacggagttccggtggccggcttgacctggatgccattcaccgacccacgctataccgccgtggcgggtggtccgctgatcaagaacggtgtaccgcagccgccgctggctgacgccgaactggccaacgtgctcgtcggcgtcggcacattc

SEQ ID NO: 769 - DNA, 401 bp, Mycobacterium tuberculosis H37Rv
gcggctgcgcatgcacggatccaccggcatcgatctcgtcttcgtcgctgacgggatactcggtggtgcaataagtttcggaggtcacgtttgggaccatgccgctggggtggcgttggtacgagccgccggtggcgtggtcaccgacctggctgggcaaccgtggacccctgcatcgcgttctgccttggccgggccaccgcgcgtgcatgcccagatcctcgagattcttggcagcataggggaaccagaggactactgagatgtatgccgaccgtgaccttccgggggctgggggcctcgcggtacgcgtgatcccgtgtctggatgtcgacgatgggcgggtggtcaagggagtcaacttcgagaacctccgcgacgccggtgatcccgtggaactc

SEQ ID NO: 770 - DNA, 401 bp, Mycobacterium tuberculosis H37Rv
cgcggacgagttgacctttctcgacgtgaccgcgtcgtcgtccggaagagccaccatgctggaggtggtgcgccgcaccgccgagcaggtgttcatcccgctgacggtgggcggtggggtacgcaccgtcgccgacgtcgattcgctgctacgggctggggctgacaaagtcgccgtcaacacggccgccatcgcttgcccggacttgctggcggacatggcgaggcagttcggctcgcagtgcatcgtgttgtccgtcgacgcgcgcacagttccggtgggatcagccccgacaccgtcgggttgggaggtcaccactcacggcggtcgtcgtggcaccggtatggacgccgtgcagtgggcggcccgtggcgccgacctcggtgtgggggagatcctgc

SEQ ID NO: 771 - DNA, 401 bp, Mycobacterium tuberculosis H37Rv
cggtgtcatcgttggttccgcattggtgacggcgctaaccgaggggttgcctagattgcgggcactgaccggagagctcgctgccggggtacgactagggatgtccgcatgatgcggatgttgcccagctatatccccagcccaccgcgcggggtttggtacctgggcccgctacccgtccgcgcctacgcagtttgcgttatcaccggcatcattgtcgcactgctgatcggggatcgccggttgacagcccgcggcggcgagcgcggcatgacctacgacatcgccttgtgggccgtgcctttcggcctgattggcggcaggctctatcacctggctaccgactggcggacatatttcggtgacggtggtgccgggctggccgcggcactgcgaatctg

SEQ ID NO: 772 - DNA, 401 bp, Mycobacterium tuberculosis H37Rv
aacaagggcatctcgttgcccggaatgaacgtgaccgcgccggccctgtcggagaaggacatcgaggatctcacgttcgcgctgaacctcggcgtcgacatggtggcgctttccttcgtccgctccccggccgatgtcgaactggtccacgaggtgatggatcggatcgggcgacgggtgccggtgatcgccaagctggagaagccggaagccatcgacaatctcgaagcgatcgtgctggcgttcgacgccgtcatggtcgctcggggcgacctaggtgttgagctgccgctcgaagaggtcccgctggtacagaagcgagccatccagatggcccgggagaacgccaagccggtcattgtggcgacccagatgctcgactcgatgatcgagaactcgcg

SEQ ID NO: 773 - DNA, 401 bp, Mycobacterium tuberculosis H37Rv
gttggcggggtcgatgacgccggcgacgatgcttgccaacacgatcgccgagccgatggcgcagccggagatcccgaccccgcaggccaccgtgctgagtagatagcggcgcagcgccgccgatgcctgccacagccgcggatccaggggcgcccgggttccccgggccttggtgctcagggcgcgcgcctcgccagaccggtgggtggaggtatccgttcagctgagatccgttgccggaaaacccaatacgtccatgtctggtacgccaccgtcagtggagcgaagaacgcggtcacccacgtcatgatcttgagggtgtacggggtcgacgacgcgttatggatcgttaggctccactgcgggttcagggttgagggcaccaggttcgggtacagcgc

SEQ ID NO: 774 - DNA, 401 bp, Mycobacterium tuberculosis H37Rv
cgaactgccaccgcgaaatgtcgacgacattcatctgtcatctccggagatactacggggccgactgatttggctacgacgaagtgtagtaggcacgagtgggcccgcgctactggcaatcgtgggtgcaccgcgattctgcggtcagccgagcgtctgcgaagccttgcggatggcgaacgacgacgcgatctcgcatgtgccgatcaccacgagccagatgccgacgaccaacgccagtatccagatggactcgaacggcgatgccatcaccacaatgccggcgatgaggctgatcacgccgacgaagatggaccatccccgtcccggcagcatcggatcactaatcgccgaaaccgtggtggcgacgccgcggaagatgaacccgatgccgatccaga

SEQ ID NO: 775 - DNA, 401 bp, Mycobacterium tuberculosis H37Rv
aagatcgccacataggcggtgccgatgaacgtaagcggtgccaccaatcccccgaagcgatgtagcaggggcacgatcgcgaaagtaaccgcggtgaagacgttgatcagggcgatgtaccagcccccggccccggtcgctagttgcattagcgcgaagctcccggttaccacgacagcgagccaggcggtgatggtaagcacgcgctgccgccgcgcgacgctttcggcgtagtgctgcgtgggagcgcgggcctgagtgcgcacggccgtgacacagtctgggcgtcgtgtcgagccatccgctgctatcggtggggcgccgcattttcttgccgccacgaactaaagcctaatcggtgagttagcgtttaccgactctgtcggcgctttccgggtgcg

SEQ ID NO: 776 - DNA, 401 bp, Mycobacterium tuberculosis H37Rv
gtaagcacgcgctgccgccgcgcgacgctttcggcgtagtgctgcgtgggagcgcgggcctgagtgcgcacggccgtgacacagtctgggcgtcgtgtcgagccatccgctgctatcggtggggcgccgcattttcttgccgccacgaactaaagcctaatcggtgagttagcgtttaccgactctgtcggcgctttccgggtgcgttcgcttggtgccctcggtgggattcgaacccacactggacgggttttgagtccgtttcctctgccagttgggatacgagggcttgatccggtctcctactctagaggagccacgtcccgactcaccgccccccgaggttcccgatcgcgcccgctcacgacacaatgtccgtcatgaccggccccaccaccgac

SEQ ID NO: 777 - DNA, 401 bp, Mycobacterium tuberculosis H37Rv
cccaccaccgacgccgatgccgctgtcccacgtcgggtcttgatcgcggaagatgaagcgctcatccgcatggacctggccgagatgttgcgagaggagggatatgaaattgtcggcgaggccggcgacggccaggaagccgtcgagctggccgagctgcacaagcccgacctggtgatcatggacgtgaagatgccgcgccgggacgggatcgacgccgcatccgaaatcgccagcaaacgtattgccccgatcgtggtgctgaccgcgttcagccagcgtgatctggtcgaacgtgcgcgtgatgccggggcgatggcatacctggtaaagcctttcagcatcagcgacctgattccagcgattgaattggcggtcagccggttcagggagatcaccgc

SEQ ID NO: 778 - DNA, 401 bp, Mycobacterium tuberculosis H37Rv
ctgcgctctgcatcgtcgccggcgcgcgatgggatccgccacgcgtagacgatgcgctgcacaccgtcgtcgtcggcgaacagcggcatggtcgtcagctccatctccatgccgaccttcagatcggcggccagcgtgccatcgaccactttgcccagcacgatcagtccctcgtcggccagttccaccgcggccacggcgaacggctcaaaggggtcgggtgccgggtacggcggtggcggggcgtaccggttttcggtgtagctccaaagctttccgcgggtcgacagtccgaccgactctagtgtgtcgctgccgcaagccggattcggacaattgtccgcccggggtgggaagacgtacgtgccgcactggggacacttgccgccgagcagatgcgg

SEQ ID NO: 779 - DNA, 401 bp, Mycobacterium tuberculosis H37Rv
tcgacccggcgaagtacggcatggccgacagttacgacgagcagggcaactacatcttccccgagggcttcgatgccgaaaccaacgaatggcttgagggattcgaaaagcagcgcgccgaatgggaagctcggtacgccgaggccgagcgccggcacaagatgcacaccgcgcagatggagaagttcgccgccgccgaggcggctggacgcggcgcggacgatcagtcgtcggccagtagcgcaccgtcggaaaagaccgcgggtggatcactggccagcgacgcccagctggcggccctgcgggaaaaactcgccggcagcgcttgatcttgcagctgatcgcgttcacgtaatgctgcgcatcgggctgaccggcggcattggcgccgggaagtcgtt

SEQ ID NO: 780 - DNA, 401 bp, Mycobacterium tuberculosis H37Rv
cagatagtagtcgtgatcgcgtttgtggctgggattgaagtgaaagacagtggcgcgtaggcccaacgacggcaacagccacgactcgaggtagtggaattgggcacggcccggggtgggccgggccaggtagagcccccacggatgcaccgtgtactcatcgaccgcccgcactatgcccttcggatcggtattggtgtgggcgatcaggtcgaacgtctcgtgcttgggtgggtgaatggctcaccctatctggtcgcacgaggcgtgccggtacatcgacacgccggtactggtggcattctgcgcacgctcgccgcacggtgtgtccgcgggtggctctaggctggttggcgtggctttcgctaccgagcatccggtggtcgcgcattcggagtatc

SEQ ID NO: 781 - DNA, 401 bp, Mycobacterium tuberculosis H37Rv
gatgatggcggccgcgcgcgacctgcagttcgagctggcggcccggttccgcgacgagatcgccgacctcaagcgggagctgcgggggatggacgcggccggcctgaagtgaccgaaacagcgagcgagaccggcagctggcgtgagctactgagcaggtatctgggcacctccatagtgctggccggtggcgtcgcgctttacgccaccaacgagtttctgacaatcagcctgctgccgagcacaatcgccgacatcgggggtagccggctgtacgcctgggtgacaaccctgtatctggtcgggtcggtggtggcggcgaccaccgtcaatacgatgttgctgcgcgtcggggcgcgctcgtcgtatctgatggggttggccgtcttcggtctggccag

SEQ ID NO: 782 - DNA, 401 bp, Mycobacterium tuberculosis H37Rv
tgatcaactcgaccttgcccaagtcgctgtggacccgtggctcagcactggtgtcggcgatgtggggggtcgcgacgctgatcggaccggcgaccggaggccttttcgcgcagctcgggctgtggcgatgggcgttcggcgtgatgacgttgctgaccgcgttgatggccatgttggtgccggtcgcgctcggtgccgggggggtcggcccgggcggcgagacgccggtgggcagcacacacaaggtgccggtgtggtcgctattgctgatgggggccgccgcactggcgatcagcgtcgccgcgcttccgaactacctcgtccagacggccgggctgctagccgccgccgcgctgctggttgcggtgtttgtggtagtcgactggcggatacacgcagcg

SEQ ID NO: 783 - DNA, 401 bp, Mycobacterium tuberculosis H37Rv
gccagcttcggcgcgtaccgccggaccaggtcgatgaggacctccgcgtcattggcggcgtcgatcagcagggtttctccggtcgctgaacacgtcaccaggtaggcgttgttgtccatcgggcccaccgatgccttgaggatcgtggcgccgggcaggaagcgacgcgccgccttgccgcgttcgacgtgtccggtgtagttgtcgtcgactgttgtcatatgcgccactgctcctatgccggctgcgccggcatcatcgtcgttggcgcgggtcatatgcgccgacgttacgacgttaccggtcccctgatggttgtcggtacgggcacatagcatgggatacggcctttggccggcgagatgagtttcagtgaaagggacagcgtggctgaccgcctg

SEQ ID NO: 784 - DNA, 401 bp, Mycobacterium tuberculosis H37Rv
tgcgttcaccgagtgcttccgagatcgcatcatgcaccgtccgcaccggccatatcccggagatgtcgaccggttcgaggtggtggcgggtgccgtcggaacccttgtccgtccggggccgcatggcgatgggcgccccgttggcggcctgggcggcgttctggatgagttcgcggcagccgtcaatccactcaaggtagtcggcgtgtgcttgataggcctccagtagggtgaactccgggttgtggctgaagtcgacgccctcgttgcgaaaggcacggccgagctcgaatacccgttccacgccgccgacgcacaggcgcttgaggtagagctctggtgcgatgcgcaggaacagatccatggaatacgtgttgatgtgcgtgacgaacggtcgggcg

SEQ ID NO: 785 - DNA, 401 bp, Mycobacterium tuberculosis H37Rv
gcgccgccgtgcagctgctgtaggatcggcgtttcgacctcgacgaatccctttgcgaacagcgtctcgcgcacagcgcgcagcacgctgctgcgagcggtgatcagcgcacgggactcagcgttgaccgccaggtcgaggtaacgggtccggactcgggcttcgggatccagtagccccttccacttattcggcaacggtcgcaaacacttaccgatcaggcgccagccgctgacgatcaacgatggagttccggtcttgctggcgcccatgtgtccggtcatctccaccagatcacccagatcggtcgccgcgttgaagtcggccgcgcagccctggtccaggcgtgaattatccagcagcacttgcatttcgcccgaccagtcgcgcagctgggcgaa

SEQ ID NO: 786 - DNA, 401 bp, Mycobacterium tuberculosis H37Rv
cacgcccatcttccatcaggtggaaggcctagcggtggaccgcggtctgtcgatggctcacctacgtggaacgctggacgcttttgcgcgcgccgagttcgggccgtctgcgcggacccggatccggccacacttcttccccttcaccgaaccgtccgccgaggtcgatgtgtggtttgccaacaagattggcggcgccgcctgggtggagtggggcgggtgcggaatggtgcatccgaacgtgttgcgggccaccggcattgatcccgatctctactccggtttcgcgttcgggatggggttggaacgcaccctgcagtttcgcaacggcattcctgacatgcgcgacatggtcgaaggcgacgtccgattctcgttgccgttcggggtgggtgcctgat

SEQ ID NO: 787 - DNA, 401 bp, Mycobacterium tuberculosis H37Rv
cggagccgccgagcccggagctgacggcgcgggcgtgctggggctcgacgacgtggtcttccatctggccatcaccccagaccgcggttactgcatgtcggtgcgcggcttggcccgcgagctcgcgtgcgcctacgacctggacttcgtcgaccccgccagcaactcgcgggtgccgccgctacccatcgaggggccagcctggccgctgacggttcagcccgagacgggggtgcgccggttcgcgctacgcccggtcatcgggatcgaccccgccgcggtatcgccctggtggttgcagcgccgactgctgctctgcggtatccgcgcgacctgtccggcggtcgacgtgaccaattacgtgatgctcgaacttggccaccccatgcacgcccacgacc

SEQ ID NO: 788 - DNA, 401 bp, Mycobacterium tuberculosis H37Rv
cgttaccaaatatcgtcccggcgtggccggcggctccgccggaagccccacttccgccgttcccgccgttgccgaacagcagggcgttgccgccggccccaccggccgcagcggcactgcccccgttgccgccggcaccgccgttgccatacaacagtccgccggtgccgccggccccgccagcgccgcctgcacctccagcaccgccggcgccgccggcgccgccgttgccgatcaatccggcggccccgccgttaccgccggccccgccgttgccgccgttgccgtacaaaattccaccgggcccgccgttgccgccggcatttgacccggtccccgccactccatcggcgccgttgccgatcagtgggcgccccagcagcgtctgcgtgggcgcattc

SEQ ID NO: 789 - DNA, 401 bp, Mycobacterium tuberculosis H37Rv
gcgtcgcgggcgcacaccatggtgctgtttcgggccgggctgctcaccgaggagcaacgcgacgggctgctcgccggcctggacagcctcgcccaagacgtcgccgacggcagcttcggcccgctggtcaccgacgaggacgtgcatgccgcgctggagcggggcctgatcgaccgggtcggaccggacctgggcggccgactgcgggccgggcgctcgcgcaacgaccaggtggccgcgctgtttcggatgtggctgcgcgacgcggtgcgccgggtcgccaccggtgtgctcgacgtggtcggtgcgctggcagagcaggccgccgcacacccgagcgccatcatgcccggcaaaacccacctgcagtccgcccagccgatcctgctggcacaccatct

SEQ ID NO: 790 - DNA, 401 bp, Mycobacterium tuberculosis H37Rv
agtggtcgctgctcgacgtgctgcgcggggcacccggcgcaccggggctggatcgggtggatgtggtgcagccggcgttgtgggcggtgatggtgtcgctggccgaattgtggcggtcggtgggtgtggttcccgacgcggtcatcgggcattcgcagggggagatcgcggcggcatatgtggcgggcgccctgtcgcttcgggacgcggctgcggtggtggcactgcgcagccggttgctggtgcggttgggcggtgccggcggcatggtctcgttggcctgtggccagccgcaggccgagaagttggcgtcccaatggggagaccgactgaatatcgctgcagtcaatggtgtctcgtcggtcgtgctggccggcgagacggatgccgtgacggagctg

SEQ ID NO: 791 - DNA, 401 bp, Mycobacterium tuberculosis H37Rv
cggttctggctagacggcctaggtgctgttggcggcgatctgggtggtgtcggcttggtgggcgccgagcatggattgttggctgcagtggtgcaacggcccgactcgggtggggtggtgttgacgggccggatatcggtggtcgctgcgccgtggctggccgatcatgcggtgggcccggtggtgctgttcccgggcacggggtttgttgagttggccttgcgggccggtgacgaggtgggttgttcggtgctgcaggagttgacgttgcaggcaccgttggtgctgccggcagatggggtgcgggtccaggtggtggtgggcggcgtcgagcagtcgggtactcggaatgtgtgggtgtattcggctgccggccaggcggattcgagtccgggatggac

SEQ ID NO: 792 - DNA, 401 bp, Mycobacterium tuberculosis H37Rv
acgtcactctccctgagggtgtgccgatacgggggtttgggattcatccggcggtgttggatgcggcgttgcatgcgtggggaattgtcgagggtgagcagcagacgatgttgccgttctcgtggcagggggtgtgtttgcacgcaagcggggctgcgcgggtccgtgtgcgactggcgccggtgggccggggggcggtgtcggtggagttggccgatccgcaggggttgccggtgttgtcggtgcggcagttgatggttcgtccggtctcagcggccgcgttgtcgaggtcgaccgccggcgaccggggattgctggagatgatctggacaccggtgccgttggagggcggcgacattggcgacgacgccgtggtgtgggagctgccgcctcacgccggc

SEQ ID NO: 793 - DNA, 401 bp, Mycobacterium tuberculosis H37Rv
tgaagcgtctcacggcagatctgcggcgcacccgcagacgcctgtccgacttggaagccaagttgtccgagccggttgcggtggtcggaatgggatgccgttatccaggtggggtggattcgccggagacgttgtgggagctggtggcccagggccgtgatgcggtatcggattttccggcggatcgcgggtgggatgtggacgggttgtttgatcctgacccggatgcatgcgggaagatgtatacccgccgcgggacgtttctggagcatgcgggtgacttcgacgccggattctttggaatcggtcctagcgaggcgctggcgatggacccgcaacagcgcctgctattggaagtgtcgtgggaagcgttggagcgtacgggaattgacccgaccaag

SEQ ID NO: 794 - DNA, 401 bp, Mycobacterium tuberculosis H37Rv
acccgccgcgggacgtttctggagcatgcgggtgacttcgacgccggattctttggaatcggtcctagcgaggcgctggcgatggacccgcaacagcgcctgctattggaagtgtcgtgggaagcgttggagcgtacgggaattgacccgaccaagttgcggggttcggcaacgggtgtgttcgccggtgttatccatgccggctatgggggccagctatccggcgagctggaaggctatgggttaacgggttcgacgctgagtgtggcctccgggcgggtggcgtatgtgctggggttggagggtccggcggtgtcggtggacacggcgtgctcgtcgtcgttggtggcgctgcatttggcggtgcagtcgctgcggtcgggggaatgcgatttggcgct

SEQ ID NO: 795 - DNA, 401 bp, Mycobacterium tuberculosis H37Rv
gcatcggctagcggtatcacatgcgtttcattcgttgctgatggaaccgatgcttgccgagttcacgcggatcgctgccggtatttcggtgtcgaaaccgcggattccgttggtgtccaatgtgaccgggcagatggccggcgcaggctacggcgatggacagtactgggtggagcatgcgcggcgccccgtgcgatttgccgagggcgtccagttgctgaatgcggttggggccacaaggtttgttgaggtgggtcccggcggtggcctgacagcattggtcgagcagtcgctgcctttaggcgaggcgctatcggtggcgatgatgcgtagagagcaccccgaagtgtcgtcggtgctcggcgccgtggcgacattgttcactgcgggtgcccaaatgg

SEQ ID NO: 796 - DNA, 401 bp, Mycobacterium tuberculosis H37Rv
gcgggtgcccaaatggattggccggcggtgtttggcagtccgggtcgacggatcgaattgccgacctatgcgtttcagcggcagcggtattggttgccgcctacgtcggcgggttcggcagacatcagcggtgttggtctgctggcagcccggcatggtttgttgggtgcggttgtggagcaaccggattcggacgtggtggtactgaccggccggctatcggtgggggagcagcggtggttggccgatcacgtgatcgctggagtggtgttgctcgccggtgcggctttcgtggaactggcgctgcgagccgccgaccaggtggattgtggggtggtcgaggagctgacggtggtgactccgttggttttgccgacggtgggcggggtgcagctacaggt

SEQ ID NO: 797 - DNA, 401 bp, Mycobacterium tuberculosis H37Rv
ccgtcgccgctgccgatgccgcaggtcgcgggttgttggaagtggcgtggttgccagtggaattggcgcacaacgacatcagcgccgacctcgtggtctgggagttggagtctttccaggacggtgtgggtccggtgtattcggctacgcatcgggtgttggtggcattgcagtcctggctggcccaggagcgggccggccgactggtggtgctgacccaagggtcggtcggccaggatgccacgaacttggccggcgccgcggtgtgggggttggtgcggtcggctcaagccgaacatccgggtcgggtgatgttggtcgattcggacggctcgatggatgttggagatgtcattggctgtggtgaagagcaattgatgatccggaacggcacagcctat

SEQ ID NO: 798 - DNA, 401 bp, Mycobacterium tuberculosis H37Rv
gttgggggccgaaggggcaggggtggtcaccgaagtcggtccaggcgtgaccggtttagcagttggtgatccggtgatgggtctgttgggggtggcggggtcggaagcggtggtcgatgcgcggctggtggtcaagctgccgaaccggtggccgctgaccgatgctgcgggtgtgccggtggtgtttctgacggcctactacgcgttacgcgtgctggcgcaggtgcagccgggcgagtcggtgctggtacacgccgctgcgggcggggtgggtatggcggcagtgcaactggctcggctgtggggattggaggttttcgctactgccagtcgcggcaagtgggacacgttgcacacaatgggatgtgacaacacgcatgttgccgattcacgcacactgg

SEQ ID NO: 799 - DNA, 401 bp, Mycobacterium tuberculosis H37Rv
tccggcccgtctaccacccatgacgacgaggacatcaccaccgccactgaaagccagctttttgccatcctcgacgacgaacttggaccttagcgcacgtgcaaccgacaggcatcgcaatcatcgggctggcatgcaggtttcccaccgtcgtcagccccggcgacctctgggacctgttgcgcgacgggcgagaggctgctggatccattgacaacgtcgccgatttcgacgccgactttttcaacctatccccccgcgaggcgagcgcgatggaccccaggcaacgactggcgctcgaactcacctgggaactgctcgaagacgctttcgtggtgccggaaacgctgcgcggacaaccgatcgcggtctacctcggagcgatgaacgacgactacgca

SEQ ID NO: 800 - DNA, 401 bp, Mycobacterium tuberculosis H37Rv
gcaccaagatcggcgacccgatcgaggcgcgggcgctgggtgagatcttcgcggcgcggcaacgtcgcccggtgagtgtggggtcggtcaagaccaatattggtcataccgggggagccgctggaatcgccggattactcaaggcggtgttagcgattgaaaatgccgtgattccacccagcctcaactacgtcggtgccgcaattgatttggatagccttgggcttcgggtcgacaccgcgttgacgccgtggccggtggcggatgagccgcgacgggctggggtgtcgtcgtttggcatgggtgggacgaacgcgcatgtgatcctggaacagggtccgacgcagtcgccagagatagtggaatctgttgccgcagcgggtagtaacgctccggtggcg

SEQ ID NO: 801 - DNA, 401 bp, Mycobacterium tuberculosis H37Rv
atcgttgccacatagcgctggacgtgatggtgccgcagccccggtgccaccacactgcggcggcgccggtggtccgcgccgtcgctgacgatcagcgcggtcggcccgtcgacgggaaccaggctctcaaacgtttggctccagctgaacgcgtcggcattggcgaacacgaatctgttggcctctgctcccaggagataggtgtagccatgcccaccgactccggcgttgatcagcggaccgcgccatcgatacagcgccagcagcgcttcgccaagcgggtagcgcaccgtccgatacgtcctcattcgagcatctccgaaagctccagccagcgattctccatcgccgcgacgtggtcttgcaggacacgtagttgctgggtcagccgggtgatgccg

SEQ ID NO: 802 - DNA, 401 bp, Mycobacterium tuberculosis H37Rv
caccagcagatccaacagctccaatcgatggccgctggacagcgcttgcccgaccagggcgaactgctcgaagatcagcttctttgcaccggacatgccgccgctccattcctcgattcagatgttcgtatattcaattgattgtttgatcatgtcattccgacacgctgctgcggtttcgccgccggggcgtcgcaccgctactcggtgccggctacggcctcacccgcggccgcgggttcgcgaccgggccctgcgccgcgccctcggggtgggcggaatgtcctccgcggtcagcaccggtgcattcctgaccaccgtgtgcctcgcgcacctggtgctcggcgcgcttatgggtgtactagtgcacgaattcggcgccgacatgctgtcgttgtggc

SEQ ID NO: 803 - DNA, 401 bp, Mycobacterium tuberculosis H37Rv
aggcgcgccccgtgtagaccatcggcatctccagtagcagcgggatgtcgccatcgacatcgccgggatgaaggatgttcaccacggcgcggcgccgcctggagccgaccgcgagctcaattaatccgtgtcgcacaatccacaccccgtccgcggtttgatcggcgtggaataccactgccccgggggcaaactccttgacttgtaacgtttcggccaatgccgacacatcgtcacggtgcagtggcgccgagcctccgcgaccgacgcaccgcgcaatccaggctgcctgtcggacctgggcctcggaaggcggttggcccccagtcaccgcatgaacgagatgccgcagcgggcgcaccgaccgatctgccatggcccctccttgagagcaggcgatg

SEQ ID NO: 804 - DNA, 401 bp, Mycobacterium tuberculosis H37Rv
gcggtatggcgtggcctgggcgatgatcgacccgcctatgtcgggatacgggcgttggagttctccctcggggaatacaacctgcgcggcgcactggcgctgatcgcgatcgcgctggcaatgttggcggccgccaaacgcggctggcgcaccgtcgcgttggtcgcggcggtggtcgcggtggccgccgcggccgccatctacctgcaagtcggccggaccgcggtgtggctcggcgggacgaacaccaccgcagcggttttcgtgtgcgcggcggtggtgagtctggcaaccgaattccggatcggacgggtggaaggggcgtgatggccacaccgggcgttgtgcaggaagtcgtttccgtcgctgcagaacacgccgagcgggtcgacaccgactgt

SEQ ID NO: 805 - DNA, 401 bp, Mycobacterium tuberculosis H37Rv
cgcggtggatgcggtgctcgccggtgaggccgacgtggcggcgatcggcagctccacgtgggccgcgatgggcgccgcggagctgatgggggagtcgttgaccgaggtgtggcgcaccgacggctactgccactgcatgttcaccgcgctggatacgctgcccgccgaaagataccagccgtggctcgaccggttgctggcgatgagctgggatgactccgagcatcgaaagatcctcgaactcgagggtttacgacgttgggtgcctccgcacctggacggctacaagccgctgttcgaggccgtgcaggagcagggcatcgacccgcgatggtgatcatagagctgatgcgccgggtggtaggtctcgcacagggagctaccgccgaggtcgccgtcta

SEQ ID NO: 806 - DNA, 401 bp, Mycobacterium tuberculosis H37Rv
cccgtaccgtcgaacccttgaccccggcgctggacatggtaagccggctattcgccgaacagtggacacgagccgccgaagaggccgcgttgttcccgtgtgcgtagtgcccagtctgccggccgcgaacccaggattaattgctgatgacaagtattgccctactgcactatagttctgcttgcacttgaaaacaacgaaccgtgatgcgggtcgtaagggattccggtaaggaacacagtcaagttcttgcacgcgtcggcggcagtgttgcctcaacgcccaaactgcaccaaactgtttcgcccacggcggggcgtgtctgagaggtatcgcgtgaccaccgcccataacggatccgctccgcgttttcaacgtacccgctctggctacgacccggt

SEQ ID NO: 807 - DNA, 401 bp, Mycobacterium tuberculosis H37Rv
gatcgagaacgcggtcccgtagccggcgagcagatcaagccggcgtagcggggtggtcaggatgcgctccagcgttcccgaagccctttcgcgttgcatggtgatcgccgtgatcacaaacatcacaaagagtgggaacaggcccagtagcaccaggcaagcggtgttgaacccggatggggtaccggggcgatgcgggacgttctcgaacatgaaatacatcagcgtgatgatcaggatgggtaccagcaagatcatcgcgacactgcggtgatcagcggcaagctgccggagaatccgcgccgtagtggccgtgtagttctgcagcgttagccggccgcgggcacggtggtggtgcgtcggacgatggacagaaacgcttcctccagtgatgtgcatcc

SEQ ID NO: 808 - DNA, 401 bp, Mycobacterium tuberculosis H37Rv
tcgacgcgcaataccggatccaggccgatggtcggctcgtcgagcactagcagatcaggccggccgaccagcgcacacgccagcgagacccgggcccgctggccgccggacaggttggcacaacgggcggtgcggtgatcgcgcaggtccaccgcttcgatcacctcatcggcggcttgcctgtcgacgccgcagagttcggcgaagtagcggatgttgtcgatcacccgcaggtcgttgtaaatggtcgggtcctgaggcatgtatccaacccgatggcgtagttcggctgacccagccggttggcccagcacgctcaccgaacccgaggcaatgatttgggagccaacgatgcagcgaatcagtgttgtcttgcccgacccggacggaccgagcaggcc

SEQ ID NO: 809 - DNA, 401 bp, Mycobacterium tuberculosis H37Rv
ttcgtgaacaccgcggacgcggatgtgatccgctacctacggtggttcaccttcttgtcggccgacgagttggccgagctggaacaggcgacagcgcaacgcccgcaacaacgggccgcccagcgccggctcgccagcgagctcaccgtcttggtgcatggcgaggcggcgaccgcagccgtcgagcatgccagccgggcactcttcggtcggggcgagttggcccgtctggacgaggcgacactggctgctgcgttgcgggaaaccacggtcgccgaactcaaaccgggcagtcccgacggaatcgtcgacttattggtggccagcggcctgtcggccagcaagggcgcggcgcggcgcacgatccacgagggtggggtgtcggtcaacaacattcgggt

SEQ ID NO: 810 - DNA, 401 bp, Mycobacterium tuberculosis H37Rv
gggctgcaggcggttctcgactcgtcgggggccgagcgcgacgaggacggcagcgtgatcgcgttgcgctcgatcagtcgcgatggaccgtcgcgcgcctacctcggcggccgcggtgtacccgccaaatcgttgagcggtttcacgaacgagctgcttactctgcacgggcagaacgaccagctgcggttgatgcgcccggacgaacaacgtggtgcactggaccgctttgcggccgctggcgaagccgtccagcgttaccgcaagctgcgggatgcctggctaacggcccgacgcgacctcgtcgaccgtcgcaaccgggcccgggaactagcgcaagaggccgatcggctgaaattcgcgctcaacgagatcgacaccgtcgacccgcagccggggga

SEQ ID NO: 811 - DNA, 401 bp, Mycobacterium tuberculosis H37Rv
gtcgaattatccgacgcttacctctcggttgccgaggcattgcgtgccggcggattcaagcaccgggccaaggtcgagatctgttgggtggcatccgacggttgtgaaacgaccagtggtgccgcggcggcgctcggcgatgtgcatggggtgctcattccgggcggattcggcatcaggggcatcgagggcaagatcggtgccattgcatacgcgcgggcgcgcgggttgccggtgttggggctgtgcctcggtttgcagtgcattgtgatcgaggccgcgcgatcggtcggtctcaccaacgccaattcggccgaatttgatcccgacacaccagatcccgttatcgccacgatgcccgatcaagaagaaatcgtggccggcgaggcggatctgggcgg

SEQ ID NO: 812 - DNA, 401 bp, Mycobacterium tuberculosis H37Rv
tccccgagcacacacccaacggtagctcccatcgggacggcgtgggccagccgctaccggaacctgcgtctcgtggctgagcatgatttcgagacgatatcgtcggaaaccttgcatacgggagccattttcgcattacgtcgggaccaggtgcggatgcctggtgggggtattgtgacgcgtgaggtcgtcgagcacttcggtgccgtagccattgtggcgatggacgacaacggcaacatcccgatggtttatcagtaccgccacacctatggtcggcggctttgggaactgcccgcggggttgctcgacgtcgctggggagccacctcatctcacggccgcccgggagctgcgggaggaggtcgggctgcaagccagcacctggcaggtgctggtcga

SEQ ID NO: 813 - DNA, 401 bp, Mycobacterium tuberculosis H37Rv
ggcccgaagcccatcacgaagaagccgacatgacgatggggtggtatcccattgccgaagcggctcgccgggtgctgcgtggcgaaatcgtcaattccattgccattgccggtgttttggccgtgcacgcggtgacgaccgggttcgcccagccacgcccactcgataccgaatggatcgacaggccaacggcgttcgccgcgcggagagccgagcgatgaagacgctggcactgcaattgcagggctacctcgaccatctgacgatcgaacgaggtgtcgcggcaaacacattgagctcctaccgacgtgatctgcgccgctactccaagcacctggaagaacgagggattaccgatctggccaaggtcggcgagcacgacgtcagcgagttcctggtgg

SEQ ID NO: 814 - DNA, 401 bp, Mycobacterium tuberculosis H37Rv
tcggtttcggtggtaagtgtccagatcacgaacgcgaaaaacaccagcacggcccagcacatcaccacgccaccgggcatcttgtacaccgagtcggtgtgacgctgtgggtgtcggcgacggtagacgaggtagctgatgatgatcattgcccacacaaacatgaacagcagggatgagaccgtcgtgacgagtgtgaacgccccaatcaccgaccgaccggcatagagcagcgggatggaggtcagcagtagcggagccgtcagcagcagggcgggtgcgggcacgccgccgcgattgagttggtggaaagcggccggagcgtggccttcgtcggcgaggccgaaaagcattcgcccggtggagaagaagccggagttcgctgacgaggccgctgcggt

SEQ ID NO: 815 - DNA, 401 bp, Mycobacterium tuberculosis H37Rv
acccaatgatcccgtagaccaccatgaccgccggaccggcgagcgagatcgttcgcccagatcccatgaataggccggtgccgatcgcgcctccaatcgcgatcaactgaatatggcggttggcaaggtcccgacgcaggtgcggctgggtgtctgtcgggtcggcagccgcgatatcgtccggcatatatggcgtcctcgagttctggggtagggaaggcctcgcgttatccggcaaacggcggccgggacatcaccgtaacccggaacccgtagcggggacccgcaccccccgtaccggtgcccgaaccggctagcggcatgccgcccaacaggtttcccgccgcaccggcctccggttgctcgacgatatcgctgaccaggggtgcggaggccgaacc

SEQ ID NO: 816 - DNA, 401 bp, Mycobacterium tuberculosis H37Rv
ggacatcaccgtaacccggaacccgtagcggggacccgcaccccccgtaccggtgcccgaaccggctagcggcatgccgcccaacaggtttcccgccgcaccggcctccggttgctcgacgatatcgctgaccaggggtgcggaggccgaacccacggtcggggctaggctcggactggcccctgcccagttgggcggcagcgataacttgccgatggtggccgcgttgcctagacccgcggatacgggtccggtaccgccaaccgcggcgccgacggccgccggcgccgcggcggcagcttcggcggcctcgggaccgatccatcccagcgcccgccacgatgtaataaggctgttgccaataccaatggcgaaatatggcaaacccacggtgttgtaaa

SEQ ID NO: 817 - DNA, 401 bp, Mycobacterium tuberculosis H37Rv
ctttcgacttcccgcaagtcgccaattcgacgatgctgcaggtgctgctgtcggcggtggccatcgcgctgttgggatccctcgattcactgctgacgtcgctggtcatggacaacatcaggggcacccggcaccggagcaacaaagaactgatcggccaggggattggaaatatcgccgccgggctcttcggcgggctgtccggtgccggcgcgaccgtccgatcggtggtgaacgtcagaaatggtggtcagaccgccctgtcggcggccactcacagtgtcgttttgttcgttttcgttgccgggcttggtgccgtggtgcagtacatcccgctcgccgtgctgtcggggatactgatattggttgccgtcggcatgttcgactggcacgccatgcgc

SEQ ID NO: 818 - DNA, 401 bp, Mycobacterium tuberculosis H37Rv
cgccctctcgctgctggtccataggctccgatcccggcaacgcaaagccaaggtcacccaggacgacaccggcacctatcgcatcgacggtccgttgtcgttcctgtccgtcgacggtgtatttggctccctgcgcgacggtcgtgaggacgtgtcgctggacctccagcacgtcacctacctcgacacctctggtgcccgggccctgctgtatttcatcgaccactccgagaaggacggcgtcgcggtaagcatcaagcggatccccccacgcctcgaaagccaactcaccgcactcgccgacaacgagcaacgtgacaagctgagaaccgtcctcgaatccgcctgacgcattggctggttgatttgcctgcgggtctcccgggccaggcgtcggtagc

SEQ ID NO: 819 - DNA, 401 bp, Mycobacterium tuberculosis H37Rv
gtcctcgaatccgcctgacgcattggctggttgatttgcctgcgggtctcccgggccaggcgtcggtagccgttagactttcctgcgatgtcccccctgacgcccgtcaccacgagccacgaccgggtatgaccgaccaccccgacaccggcaacgggatcggcctcaccggacggccaccacgggcaatccctgaccccgcgccgcgcagctcgcacggcccggccaaggtcatcgcgatgtgcaaccagaagggtggcgtcgggaagacgacgtcgacgattaacctgggtgccgcgctcggtgagtatggccggcgggtgctgctggtggatatggatccgcaaggagcgctgtccgcgggcctgggcgtgccgcactacgagctggacaagaccatc

SEQ ID NO: 820 - DNA, 401 bp, Mycobacterium tuberculosis H37Rv
gacggcagccgagtgatcgggacacacttttggaacccgccggatcttatcccggtggtcgaggtggtgcccagcgcgcgcaccgccccagatacggcggatcgcgtcgtggcgctgctgacccaagtcggcaagctgccggtgcgggtcgggcgcgacgtgccgggtttcatcggcaaccggctgcagcacgcgctgtggcgcgaggcgatcgcgctggtcgccgagggtgtctgcgacccgaagacggtagatctcgtggtacgcaacaccattgggctgcgactggccaccttggggccgctggaaaacgccgactacatcgggttggacctcaccctggccatccacgacgcggtgatcccgagcctcaaccacgacccgcaccccagcccgctgct

SEQ ID NO: 821 - DNA, 401 bp, Mycobacterium tuberculosis H37Rv
acttttgccatgcaaccatgtgagctcaccgccgtcgcgctgaccgcaacgcccccgcccgcgcctccgtccctgcgccgggcaccggcgtcgacgtcaccgcggctggcgtgatcgtgcccgcccgcgagcctgagccccagccgcgccgcgtgctgaacggcctttcggacgtacgcgcgttctttcacaacaacaccgtgccgctgtacttcatctcgccgacgccgttcaacctgctgggcatctatcgctggatccgaaacttcttctacctgacctactacgactctttcgagggcgaacattcgcgcgtgttcgtgccccggcggcgcgaccgcagggatttcgacggcatgggggatgtgtgcaaccacctgctgcgtgatcccgagacactc

SEQ ID NO: 822 - DNA, 401 bp, Mycobacterium tuberculosis H37Rv
ccactgttcctcttccacctgctcgagtacatggacgtggactacgagctggacatcgaggcgatcaactcgcgctgggagcggggctacggcgaggacgaggtctggggtcagctgatcatgtcggagacctcgccggacctcgagctcttcaccgcgaccccacgcaccgggatgtggcgcctgaaccacgacgggcgcgtctcctttgcccgccagggcaacgactgggccacgatgctcgacgagtccgaggccttctacatgcgggtcgccgcaccgggcgacctacgctgcgagggcgcccaactcggtgtgttggtcacccgcgggcacctgcagaccgacgactaccagctcaccgagcgcggccggcgctggatcgacggcctcaaggcgca

SEQ ID NO: 823 - DNA, 401 bp, Mycobacterium tuberculosis H37Rv
atgcggtcgtgctgaagtcggcgtagccgctgggccagcaccgagcgggagatgccgggcaggccccgctcgatttcggtgaaccgcagcgggccgaagagcagctcccgcacgattagcagcgtccagcggtcccccagcagctccgccgcccgcgctaccgggcagtactggccgtacggctgcacgacaccaggctagtcgccatccctggctgcgtggttcggaattcgaacttcccgcaccccctgtgggaggcgtaacgcttggtgctggaggtgagaggcgatgaccgcgacgctgaccaagacgctgggttccctcgacgatttcaggggaacgctttgtgtccccggtgatccggactaccccagggtgcgggccatctggaacgggcaggt

SEQ ID NO: 824 - DNA, 401 bp, Mycobacterium tuberculosis H37Rv
ggtgctggaggtgagaggcgatgaccgcgacgctgaccaagacgctgggttccctcgacgatttcaggggaacgctttgtgtccccggtgatccggactaccccagggtgcgggccatctggaacgggcaggtggcccgcgaaccggccttgatcgccacgtgccacgacgcgtgcgatgtccgaacggtgctgcggcgcgcggtggacgccgggatggtgaccgcggtacgtggcggcgggcacaacgtggccggcaccgcgctgtgcgacggcggcgtggtgatcgacctctcggcgatgcgggccgtctcgctggatccagcgactgggcgggtacgggtgcagggtggtgccacgctcgccgatttggaccacgccacggtcccgttcgcccgggtg

SEQ ID NO: 825 - DNA, 401 bp, Mycobacterium tuberculosis H37Rv
ttgaccagcgcggcaagccggtggtcatgatcggcgccgtccacaccgggagcatccagaccgggatcgaagcgctgcgaccggtcaagtccctcgccagacccgtcgccgacaccgtgtggccgaccccgttcctggcccaccaggcggtgctggacgcctccaacccggccggtcaccgctactactggaaatccgaccacttggccgagctgaacgacgaggccatcgacttgctagttgagcagacggcgcagctgtcctcgccggacagcctcatcggaatcttccagctcggcggcgccgccgctcgcggcggtgagcgttcctgcttcccgagccggcacgcgcgattcatggtcaactacgccacccattggaccgaggcccgcgaggacgac

SEQ ID NO: 826 - DNA, 401 bp, Mycobacterium tuberculosis H37Rv
tgctcaccgttaggcgccctgccgtcgccgaggtggaactgtgcgtaacgcagctgatctcgcgctgtggacatcaacccaccggtggggttgcagctgcgcgggaatgtccaaaagtcagtaacggcaatcggtttgccgtcgaccacgctatgcgatgcggccacattcagaccgattatttggtcggaaaagtagcgcgtgtgagcaagctgcagcgggtcaagcaacagcctctgaaccgtagattcgtaggttgttccggcgacaagctcgatgatgcggcccgcaaccacaagacctgaattgttgtacgcgaacgcggttcccggaggggtgagctgcggtaggcgtgtcatcgccttgacatagagcgccaccgcgtcatcgccgcgcccaaa

SEQ ID NO: 827 - DNA, 401 bp, Mycobacterium tuberculosis H37Rv
ctagcgcacgcacgtattcggtgacgaccgcgcgcccatggcgcgtcccgcaccgcgtgccggtcggcgtcgcggaactcaagatgatcggcggacacaaggaccgcggcgacccggccggtggcggccgatctgaacagcttcgtggggggatccgcttcgtcaaccaacgcggaaagcatggctttggccttccgcggtcgcgtccacatgagtgtcaatatagctggactaacatgaacatcgcgaggccggttcttcgtggtaacgtgccgggatcccaagggactgccggaagcgaatttggttgcgccgcttggggcgtcgcgagagattcggcaatcccctggctggaggatcccgttcagccagggcgtaggcgctgcggcgtgcacggcttg

SEQ ID NO: 828 - DNA, 401 bp, Mycobacterium tuberculosis H37Rv
gggcgtcgaacaagcgaagttttattgtcggataagggactttcgccccttcccgcctgctgtgtttggtggcagtattggtgataccggggaaacccggtgatctgcccgaagtgctgggcgattgagcgggtatgtacacccggtttgacctaccgtcccaagacggggctaccgccttcgggcagatcctcatcctgttactgcggcgcaccgcgtcagctcgttgatcgacaggaagaacagcgcgccgcgatggtcatcgctgcagccgtggtcagcgggcagcgtagccagcacggtcgtcatgacgtggatcgcgccgtcgacggcgcaaactcgttgtgccggcttgccgaaactgaccagcgcgacctgaggtgggtagatcaccccgaaga

SEQ ID NO: 829 - DNA, 401 bp, Mycobacterium tuberculosis H37Rv
aatttgtcatagcggtagcgccaccaggagccgaccgcgacgatcgtcatcgtcacatacggcacgacggtccagaagagttcgcccatcatgtcacccgtccggcataccgcggccaccgtgtgtgcgtatggcaatgcggcctcggtcagggcattgcacagcgcggcgatgggcacccggtacccgctcagcaaccgtcgccccgcctcggggtcgacggtcgcggcgaattcgagcaccaccggcaggaagtccggggtctcgccgcgcggtggtgcgacgtcggtgctgcggtaggtctgggcgaaggccagcatctcccggccgcggttgcgggtgtcgccggcggtccagtaggtcaggtacagggtggcgcggcctcgcaggtcgaaggtgtc

SEQ ID NO: 830 - DNA, 401 bp, Mycobacterium tuberculosis H37Rv
ccaccggatcacccaaacgtgccttcgcctcccgatacatctcgacaagcacgccgcgggcgtacggatggcgcacccgcgtcggcgaatacgtgtaccaggaaaacgccgcgccgcgcgggcagccgcggggctcatactcgggccggtccgggcccaccgacggatagtcggtctcctgcgtctcccaggtgatgatgtcgtctttgacgtagatcttccaagaacacgacccggtgcaattcaccccgtgtgtggagcggaccaccttgtcgtggctccaccggtctcgatagaacacgtcgccgtcgcggccgccgcggcgggtcacggtacgcagatccgccgagatctcacccgggatgaagaaccggccgctgcgtgcaagcagctcctcgatg

SEQ ID NO: 831 - DNA, 401 bp, Mycobacterium tuberculosis H37Rv
cacccgcgtcggcgaatacgtgtaccaggaaaacgccgcgccgcgcgggcagccgcggggctcatactcgggccggtccgggcccaccgacggatagtcggtctcctgcgtctcccaggtgatgatgtcgtctttgacgtagatcttccaagaacacgacccggtgcaattcaccccgtgtgtggagcggaccaccttgtcgtggctccaccggtctcgatagaacacgtcgccgtcgcggccgccgcggcgggtcacggtacgcagatccgccgagatctcacccgggatgaagaaccggccgctgcgtgcaagcagctcctcgatgcggctgccggtccgtggtgtcaccgtcacctggacgcctcctcactcaccggctcccgcgcgtgcagcgcggt

SEQ ID NO: 832 - DNA, 401 bp, Mycobacterium tuberculosis H37Rv
agcagcgacgcctcggcgctggacagtgacatgtcacgcgcgtagctggtcgacagcgggccgatcaggttccacgcccagaagttgaccaccgagatccaggtggccagcacgagattggccgcttgccctctcatcgacacgatccggggtctcggactccggcgaactccgcgccccgcccggacagccatgcgctaaccctggcttcgatggcgccggctcagttagggccggaagtccccaatgtggcagacctttcgcccctggcggacgaatgaccccagtggccgggacttcaggccctatcggagggctccggcgcggtggtcggatttgtctgtggaggttacaccccaatcgcaaggatgcattatgaccagcgagctgagcctggtcgc

SEQ ID NO: 833 - DNA, 401 bp, Mycobacterium tuberculosis H37Rv
gatggtgatcgatacctctgcgctggtcgcgatgctcaacgatgaacccgaggcgcaacggttcgagatagccgtggcagcagaccacgtttggctgatgtcgacggcgtcatatccggagatggcgaccgtgatcgaaacacgcttcggggaaccggggggacgtgaacccaaggtcagcggccagcctctcctctataagggtgacgatttcgcatgtatcgatattcgcgcggttctcgccggctgagccggcgatgagcgccctgctggatggggtgttggacgcccacggcgggctgcagcgatggcgcgccgcggaaacggttcatgggcgggtacgcacgggagggctgttgcttcgaacccgggtgccgggcaaccgcttcgcggactaccgc

SEQ ID NO: 834 - DNA, 401 bp, Mycobacterium tuberculosis H37Rv
aacggttcgagatagccgtggcagcagaccacgtttggctgatgtcgacggcgtcatatccggagatggcgaccgtgatcgaaacacgcttcggggaaccggggggacgtgaacccaaggtcagcggccagcctctcctctataagggtgacgatttcgcatgtatcgatattcgcgcggttctcgccggctgagccggcgatgagcgccctgctggatggggtgttggacgcccacggcgggctgcagcgatggcgcgccgcggaaacggttcatgggcgggtacgcacgggagggctgttgcttcgaacccgggtgccgggcaaccgcttcgcggactaccgcatcacggtgcatgtccaacaggcccggacggtcttggatccgttcccgcgtgacgg

SEQ ID NO: 835 - DNA, 401 bp, Mycobacterium tuberculosis H37Rv
caccaccgcggttggcggggtgaggagtcgggcgatggatggcaccgcggaatcgcgggagggtacgcagttcgggccgtatcggttgcggcggttggtgggtcgcggcggcatgggcgacgtctatgaggccgaagacacggtgcgcgagcggatcgtggcactaaagctgatgtcggagacgctctccagcgatccggtcttccgcacgcgtatgcagcgcgaggcccgcaccgcggggcgcctgcaggaaccgcacgtcgtgccgattcacgacttcggtgagatcgacgggcagctctacgtggacatgcgcctgatcaacggcgtggatctggccgcgatgctgagacgccaggggccgctggccccaccgcgagcggtcgcgatcgtgcgccaga

SEQ ID NO: 836 - DNA, 401 bp, Mycobacterium tuberculosis H37Rv
tggcttgcgtcgcggacggtgcggtcagattcggcgatggtcccgagggcggcagctactatgccaacgacaggcgcccacaaatatcctgcggttgagttgcagaccgggtgggtcgttcaccgatccactgtagggccggtgactcagaacgtggccgttaattcgaaacccggcccaggttgccaacccgaagatttcgggcgccgaccacattccgcagtcccgaacaattcacgcaccacaaacaccccacacagtcggtgcagcgcacgcagccgatacaggccacgcaccgggtgcaggtgatgcatgctaggcatgccacacactgccggacagccacgcacaatacggtcagcagactgccgattatcccgacgctgcccgccgtggctgcc

SEQ ID NO: 837 - DNA, 401 bp, Mycobacterium tuberculosis H37Rv
cgaccgagccggcgactgcgacgctgcccgcggtcgccaccgagccggcgactgcgacggcgcccgtggtcgcggccgatcccgcgacggcgatgctgtcgatgctggcgatcgagcggttaattaccatgtgcggctttcggtagccggcagtcgtcggccacgggccactgtgccggacatggtccaagtttggtcaggtagcccagttgtgagcggcaccaaggggataccggggcgattacgccggcggtaacatcgcgcacgaattgttcccaggacaaccagcggatcgcgtcgacctcgtccgagttcggccggggctgttggtcaacctggactcggtagacggggcagatctcgttttccacggtgccatcggccatagcggcccggtagcg

SEQ ID NO: 838 - DNA, 401 bp, Mycobacterium tuberculosis H37Rv
acgaattgttcccaggacaaccagcggatcgcgtcgacctcgtccgagttcggccggggctgttggtcaacctggactcggtagacggggcagatctcgttttccacggtgccatcggccatagcggcccggtagcggaaccccggcaggatcagatcgacccgatctggggtcagtccgagttcggcagcgagccgccggcgtatggcgccgggtagcgattcgccaggcagggggtgcccgcagcaactgttggtccataccgccggccacgtcctcttggtggcggcccgccgcgtgatcaacagctgatcgtgcagatcgaacacatagctggagaacgcgaggtgcaaaggggtgtcgccggtgtgcacggtggccttgtcggccacacctgtcgc

SEQ ID NO: 839 - DNA, 401 bp, Mycobacterium tuberculosis H37Rv
cggcccggtagcggaaccccggcaggatcagatcgacccgatctggggtcagtccgagttcggcagcgagccgccggcgtatggcgccgggtagcgattcgccaggcagggggtgcccgcagcaactgttggtccataccgccggccacgtcctcttggtggcggcccgccgcgtgatcaacagctgatcgtgcagatcgaacacatagctggagaacgcgaggtgcaaaggggtgtcgccggtgtgcacggtggccttgtcggccacacctgtcgcgtcgccgcggtcgttgagcaaaaccacccgctcgatcggtggagctggccggtagctgcgggtcatgccagacctccttacgcttgcttgcgagggtcggttcgcggccccaacgctggcaaac

SEQ ID NO: 840 - DNA, 401 bp, Mycobacterium tuberculosis H37Rv
agcaacccaaggaccgttaccagcggtgtgtcgacttcgcgcgcgcactcggccatcgtctgggcggcgcgggtgatcctgacgacacgcgggtgtcgcaaccggtcgccgtggccgcgcccgcgaaacgctcgctgctgcggaccgccgtcatcgtccccgcggtgctggcgatgctgctggtgatggccgtcgcggtcgccgtgcgggagttccagcgtgctgacgacgagcgtgcagcgcagcctgcgcggacgcggaccaccacatcggccggcacgaccacttcggtagcccccgcgagcacaacgcgcccggcccccacgaccccgaccacgactggcgccgccgacaccgcgactgcatcgccgaccgctgcggttgtcgccatcggcgccctc

SEQ ID NO: 841 - DNA, 401 bp, Mycobacterium tuberculosis H37Rv
tcggcgattgtgacggtgatcgtcctggtcggcaagggcggtccgactcagggtgccgtagcgttgagcaagccagatctggagctgttcgttgatgtcgcggtgacctgtgtcgcctcggcgatgctcggattggcgctgtcggcgatcgccaagtccaacgaacagatcatgcccctgctggtcgtggcggtcatgtcgcagctggtgttctccggaggcatgattccggtcaccggacgtgttccccttgaccagatgtcctgggtcacaccggcgagatggggtttcgcggcgtcggccgctacggtcgacctgatcaaattggtgcccggtccgctgaccccgaaggattcgcattggcatcacaccgccagcgcgtggtggttcgacatggccat

SEQ ID NO: 842 - DNA, 401 bp, Mycobacterium tuberculosis H37Rv
cgccgagttctcgttcctgccgcgattctccccgggcaaggggctcggcgtgatcccacgcgaaggttatttccagatcgcctacctcgggcccaagggaaccgacgctcagttgcgcgagcgaggtatcgaggaattccgtcgggacgtcagcgaactgctgcccgaagcgacggcatcggtggcggcgctagcgtccatggacgaggtcaagcacctcaacgtcaaggtgaatcggttgcgtcgttggcacattgatgggctgctgtgcatcggcgacgcggcgcacgcgatgtcaccggtggcgggagtcggcatcaacctagcggtccaagatgcggtcgcggcagcgaccatcttggccgaaccgctgcgtgagcatcgagtcagcagccgccacc

SEQ ID NO: 843 - DNA, 401 bp, Mycobacterium tuberculosis H37Rv
gtgccattgaggctgtagcccccgttgccgccggccccgccggagccgtagaacaatcccgcgctgccgccggcgccgccagcaccggccttgcctgacaggctggagccgccgctgccgccggcaccgcccgacgcattgagggtgagcgagccagcattgccgcctacaccgccacccccgccggccatgcccccatgaccgccggccccgccagagccgccggcaccgtacagcccaccgggcccgccggcaccgcctgtccctccggcccccgtggagccgccgttcccacctggtccgccggttcccccgtgggcgtacagcccgccggccccgccggccccgccggcgcccccggcggtgctgccggtcccgccggcgccgccggcccccccgtt

SEQ ID NO: 844 - DNA, 401 bp, Mycobacterium tuberculosis H37Rv
ccgccggtggtcagtcctgacccgcctgccccgccgtccccgccggcgccgaacaaaccgccgcccccaccgtccccgccggccccgccggtgccgagcgttccgtgatccccgaatccgcccgccccgcccatgccgccggcaccaaacaacccgccggccccgccggcgccgcccgccccgcccgtgtgaccctgcccaccggcgccgccgacaccgccggtggtgaacagcccaccggccccgccggcgccgccagccccaccggcagtgctgaagctgaacccgccggcaccgccggccccggcggcgccggcgagcataccggcgttgccgccggttccgccggtaccgccgatgccaccgacaagagacgtcgcagccccgccggcgccgccggc

SEQ ID NO: 845 - DNA, 401 bp, Mycobacterium tuberculosis H37Rv
taacgcatagccccgcctacaatctgatcctgtcgaatgtgcccggaccccaggcccagttgtactttctgggttgccgaatggactcgatgtttcccctcggccccctccttggcaacgcgggcctcaacatcaccgtcatgtccctcaacggggaactgggtgtcggcattgtctcctgccccgacctgctgccggacctgtggggcgtggcagacgggtttcccgaggcgctcaaagagctgctggagtgcagtgatgaccagccggaaggcagcaaccaccaggactcctgagtcgtacgttcagaaccggtagtcggtgccggtgcccagaacttcgatggctgcgttgatgttcgggatcactgtggcgccgtatcggctgacgatctgcccaag

SEQ ID NO: 846 - DNA, 401 bp, Mycobacterium tuberculosis H37Rv
gtcataacagtcgccacgagacccgaccgaaggggcgatcccgagctcagccagtcggtcggtataggtcagcgatagttactgcgatccggggtcggaatgatgcaccaactcagaaagatctgaatttgattgccaaacagcatgattgaatacttgtacgggcagatcttcggtgcgcatcgtcgccgagacggcccaaacgacgatctttcgggtgcacacgtcggtgacgaacgcggtgtagcagaacccctgccaggtccgcacgaacgtgatgtcggcgacccacaaccggttgggcttactgccttgaattgccggtttaccagatcagccggccgtggtcggctacgtcggtgacggtggtgaacacggccgttgcacgccgcacagcccgg

SEQ ID NO: 847 - DNA, 401 bp, Mycobacterium tuberculosis H37Rv
acggcaacggcggcaacggtgggtccggcggggtcaaccaggccggtggcaatggcgggaatgctgggctgtggggcaatggcggatccggcggagccggcgggaacgccaccactgccggccgcaacggcttcaacgggggcgccgggggaagcggcggtttgctgtggggcaatggcggtgccggcggggccggtgggaacggcggtccggctccgctcgtgggcggggtgggcaccaccggtggcgccggcgggaacggcggcggcgccgggttgttctacggtttcggcggcgccggtgggaacggcgggatgggcggggtggcaccgagcaccggcccctcgatgggcatcctcccggccggcggtgtcggcgggcctggtggctccggcggggcg

SEQ ID NO: 848 - DNA, 401 bp, Mycobacterium tuberculosis H37Rv
cgttcacgcttaccgagacgctgtggcttgccggccaaggtttctcgaacctgttgttggcctacccgccgaccgaccgggcggcattgcgtgcgcttggcgagctgacggccaaggacccggacggggcgccgatcgtgatggtggacagcgtggagcaccttgacctgatcgagcgcacgaccgacaagccggtacggctgtgtctggatttcgatgccggctattggcgcgccggcgggcggataaaaattggttccaagcgctcgccgctgcacaccccggagcaggctcgcgcactcgcggtggagatcgcgcggcggccggcgctaacgttggcggcgttgatgtgctacgaggcccacattgcgggcctcggtgacaacgtcgccggcaagcgg

SEQ ID NO: 849 - DNA, 401 bp, Mycobacterium tuberculosis H37Rv
gatcggcttcgaatccaggagcccaatcagcgagtccagtccggcgagtccgcggcggcgcgcaacgcggcgattatgcgctgctctttttccagaaatcgtgcggtgggcgccggcaccgagatcgcgatcacgttgtcgcccagggcgcgtcgtgcgatcgcagccgcggatatccctggggtgtgctcgttgcggtcgaaagcgataccggtgcgccggatctcgacgatctcgcgccgtagaccttcggccaccatgggatccagacggcagagcgcggcctcggcgtcggcgtcgtcgagagcagccagcgccgcttttccattcgcggttccgttcaacgggaagcggagcccgacggctgagaccgcacgcagccggtaagacgattcgatctg

SEQ ID NO: 850 - DNA, 401 bp, Mycobacterium tuberculosis H37Rv
agcagtggacctcgcgggctaatttgtcgatgtcgagtgcgttgagcccgtagcgcgtaatgaggtcggttgcggcggcgtagatccgttcggcagcgatcgtgcggcggttgccgcccacgatccaatcgttacccggcactggtcaggcgcatttccatcgagaggcgaagagcgattcttctcatagtgagacacaagccttacttattctcatcgtagttgcaggtccgcctcccgcggtgagacgttcgccgaaaggctccccgggcgcagttctcgacttgcagcgacgcgttgaccaggcggtatccgccgatcacgctgaactaatgacaattgccaaggatgccaacacgttctttggtgccgaatccgtgcaggacccctacccgctgtat

SEQ ID NO: 851 - DNA, 401 bp, Mycobacterium tuberculosis H37Rv
gagctggacactctcaccgcccaggtcatgatggtcaccttgttcgccgccggcggcgagtccacggcggcgctgctgggcagcgcggtatggatactggcgacacgtcccgatatccagcaacaggtgcgcgcgaaccccgagctgctgggagcgtttatcgaagagacgctgcgttacgagccgccatttcgcggccactaccgccacgtgcgaaacgccaccaccttggacggcacggaactgcccgcggattcgcacctgctgctgttgtggggcgcggccaaccgcgatccagcccagttcgaggcacccggcgagttccgtcttgaccgtgcaggaggcaaaggccacatcagtttcggaaaaggggcccacttctgtgtcggcgctgcactggc

SEQ ID NO: 852 - DNA, 401 bp, Mycobacterium tuberculosis H37Rv
ccgaggtgccgtggattgcgccaggagcgcggcccgcctcggcggcggcttcaaagaggatccgctgcggcccgtgtggtcccggcacgaccaccggatcgccgtcggcggtgagcaactggcatttcagctggtgctgcttattggtctcatcccagtcgatgtcaaggaacagtaccaaagcgaatgggggggtcggtgtttggcattgccgccagcccagcccgagcgcatggaccttcccggactgggcatcagcctgcgccgcgtccgacaggaacagactgaccctcatgtcgccgccgctgcgatcgaactcccgggttccgattccacccctgtccttccccaatgtgcaactagccgaaggtcggtcaataccgcacccacttagactgact

SEQ ID NO: 853 - DNA, 401 bp, Mycobacterium tuberculosis H37Rv
tcggcctgggcctcgatggcgaggcgggtctgggtgagttggtgctcggcccacatgatttcggcggcccggcgaacctccgcccgcttgatcgcgatcgcggtgtccgcctccaactcggcgcgctcccgttccgctcgcgcggccgcgtggcgatcgtgcgttgtgtcaccgcgccatagccggagaatcagcggcaacaggtacagcagcgcgaagaaagcgatcgccagcattcgcgccgtcaaggcgccggcgctggccaatgtcagatcgttcatggcgacccagcgcgagcccaaaccacgacccgcatccgcgaccacggcctggcgcacctcggcaagagcctgctcgtcgtgtgccattttggcgtccaaggcaggtgcttggtgatcacg

SEQ ID NO: 854 - DNA, 401 bp, Mycobacterium tuberculosis H37Rv
ctggcctcgccgatccagcgtccgtcaagatcgaatggcggggtgaaattgtcgacctgcaccacctcggcacgtgtcgtgccgtcctcgagctgcaaccacacgtcggccggagcgccatcggtcacatgcaccctgaactgcgtctgctctccggcgcgcatgacgatggtcgccggcaatggacgcgcccagtaggatcgcagctgcgcggccagggcgtcattgcgttgctgttcggtctgggcgggaacgccgagggcggcaagagcagccaccaatgtagcctcggagaccagcacctgccggccagtccagtccgtgtactcggtggcaatgccgaatcgtcgggcaagttcgaccagcgaaggcgcgagctcggtcatgtcgcccatcttgcg

SEQ ID NO: 855 - DNA, 401 bp, Mycobacterium tuberculosis H37Rv
aatccttgggggatccgcgcagtggcaaatacccaggtcaatgtccaggtgttctgagcagaccggaaggtgatctagcgtggctgaagagagccgcgggcagcgggggtcggggtatggccttgggttgtccacgcggacccaggtaaccggttatcagttcctggcgcgtcgaaccgcaatggcgttgacacgctggcgtgtgcgtatggagattgagccgggtcggcggcagacgttggcggtggtggcgtcggtgtcggcggcgttggtgatctgtctgggggcgctgttgtggtcgttcatcagcccgtccggccagttgaatgagtcgccgatcatcgcagaccgcgattccggtgcgctctatgtccgtgtcggtgacaggttgtacccggcgc

SEQ ID NO: 856 - DNA, 401 bp, Mycobacterium tuberculosis H37Rv
tccgaatcgctatggtgggtgaccgatgcgggcgcgcggttcggggtggaggacagcaaagaagcgcgtgacgcgttggggttgaccctgacgccgagcctggcgccgtgggtggcgctgcggctgctgccacagggccccacgctgtcacgagcggacgcgttggtggagcacgacacgctcccaatggacatgacccctgcagagttggtggtaccgaaatgaagcgtggttttgcccgcccgacaccggaaaagcctccggtcatcaagcccgagaatattgtcctatcgacaccgctgagcattccgccgccggagggcaagccctggtggctgattgtggttggcgtcgtggtggtgggcctgctgggcggcatggtcgccatggttttcgccagc

SEQ ID NO: 857 - DNA, 401 bp, Mycobacterium tuberculosis H37Rv
atgccgacggcggtcgacgtcctcgactcgatcggccggcagggccgcgcctactggattcacctgatgatggcgtctcagaccatcgagagccgagccgaaaagctcatggagaacatgggttaccgcttggtgctgaaagcgcgtaccgcgggagcggcgcaggcggccggggtgcccaacgcggtgaatctgcccgcacaggccggtctgggctacttccgcaagagcctcgaggacatcatccgattccaggcggaattcctgtggcgggactacttccaacccggcgtcagcatcgacggcgaggaagcgcctgccttagtacacagcatcgactacattcgcccgcaattgtttaccaactcgttcacaccgctggaagttagcgtggggggtcc

SEQ ID NO: 858 - DNA, 401 bp, Mycobacterium tuberculosis H37Rv
acatcatccgattccaggcggaattcctgtggcgggactacttccaacccggcgtcagcatcgacggcgaggaagcgcctgccttagtacacagcatcgactacattcgcccgcaattgtttaccaactcgttcacaccgctggaagttagcgtggggggtcccgatatcgagccggtagttgcccagcccaacggtgaggtgctcgagtcggacgacattgaaggcggcgaggacgaggacgaagagggggtgcgcaccccgaaggttgggacggtgatcattgatcagctgcgcaagatcaagttcgagccgtaccggctctggcaaccgccactaacccaacccgtcgccatcgacgacttggtcaaccggttcctcggccgcccgtggcacaaggag

SEQ ID NO: 859 - DNA, 401 bp, Mycobacterium tuberculosis H37Rv
actcccacgacgggggtggtcccggcggccgccgatgaagtgtcggcgctgacggcggctcagttcgcggcacacgcccagatctatcaggccgtcagcgcccaggccgcggcgattcacgagatgttcgtcaacactctacagatgagctcagggtcgtatgctgctaccgaggccgccaacgcggccgcggccggctagaggagtcactgcgatggattttggggcgttgccgccggaggtcaattcggtgcggatgtatgccggtcctggctcggcaccaatggtcgctgcggcgtcggcctggaacgggttggccgcggagctgagttcggcggccaccggttatgagacggtgatcactcagctcagcagtgaggggtggctaggtccggcgtcag

SEQ ID NO: 860 - DNA, 401 bp, Mycobacterium tuberculosis H37Rv
cgctgcaaagcctcacctcacctctgttgcagtcgtctaacggtccgctgtcgtggctgtggcagatcttgttcggcacgcccaatttccccacctcaatttcggcactgctgaccgacctgcagccctacgcgagcttcttctataacaccgagggcctgccgtacttcagcatcggcatgggcaacaacttcattcagtcggccaagaccctgggattgatcggctcggcggcaccggctgcggtcgcggctgctggggatgccgccaagggcttgcctggactgggcgggatgctcggtggcgggccggtggcggcgggtctgggcaatgcggcttcggttggcaagctgtcggtgccgccggtgtggagtggaccgttgcccgggtcggtgactccg

SEQ ID NO: 861 - DNA, 401 bp, Mycobacterium tuberculosis H37Rv
ccaattttttcggtcagaactcggcggcgatcgcggtcgctgaggcgcagtacgccgaaatgtgggcgcaagacgccgttgctatgtatggctatgcggctgcgtcggcgagcgcgtcgcggttgattccgttcgcggcgccgccgaagaccaccaactccgctggggtggtcgcacaggcggttgcgtcggtcagctggccgaatcccaatgattggtggctcgtgcggttgctgggctcgattacccccacggaaaggacgacgatcgttcgtttgctcggtcagtcgtacttggcgacgggcatggcgcggtttcttacctcgatcgcacagcagctgaccttcggcccagggggcacaacggctggctccggcggagcctggtacccaacgccacaa

SEQ ID NO: 862 - DNA, 401 bp, Mycobacterium tuberculosis H37Rv
tggccgaatcccaatgattggtggctcgtgcggttgctgggctcgattacccccacggaaaggacgacgatcgttcgtttgctcggtcagtcgtacttggcgacgggcatggcgcggtttcttacctcgatcgcacagcagctgaccttcggcccagggggcacaacggctggctccggcggagcctggtacccaacgccacaattcgccggcctgggtgcaggcccggcggtgtcggcgagtttggcgcgggcggagccggtcgggaggttgtcggtgccgccaagttgggccgtcgcggctccggccttcgcggagaagcctgaggcgggcacgccgatgtccgtcatcggcgaagcgtccagctgcggtcagggaggcctgcttcgaggcataccgct

SEQ ID NO: 863 - DNA, 401 bp, Mycobacterium tuberculosis H37Rv
aaatcaacttgttgcgttgcagtgatctactctcttgcagagagccgttgctgggattaattgggagaggaagacagcatgtcgttcgtgaccacacagccggaagccctggcagctgcggcggcgaacctacagggtattggcacgacaatgaacgcccagaacgcggccgcggctgctccaaccaccggagtagtgcccgcagccgccgatgaagtatcagcgctgaccgcggctcagtttgctgcgcacgcgcagatgtaccaaacggtcagcgcccaggccgcggccattcacgaaatgttcgtgaacacgctggtggccagttctggctcatacgcggccaccgaggcggccaacgcagccgctgccggctgaacgggctcgcacgaacctgctga

SEQ ID NO: 864 - DNA, 401 bp, Mycobacterium tuberculosis H37Rv
cggccattcacgaaatgttcgtgaacacgctggtggccagttctggctcatacgcggccaccgaggcggccaacgcagccgctgccggctgaacgggctcgcacgaacctgctgaaggagagggggaacatccggagttctcgggtcaggggttgcgccagcgcccagccgattcagctatcggcgtccataacagcagacgatctaggcattcagtactaaggagacaggcaacatggcctcacgttttatgacggatccgcatgcgatgcgggacatggcgggccgttttgaggtgcacgcccagacggtggaggacgaggctcgccggatgtgggcgtccgcgcaaaacatttccggtgcgggctggagtggcatggccgaggcgacctcgctagaca

SEQ ID NO: 865 - DNA, 401 bp, Mycobacterium tuberculosis H37Rv
agctatcggcgtccataacagcagacgatctaggcattcagtactaaggagacaggcaacatggcctcacgttttatgacggatccgcatgcgatgcgggacatggcgggccgttttgaggtgcacgcccagacggtggaggacgaggctcgccggatgtgggcgtccgcgcaaaacatttccggtgcgggctggagtggcatggccgaggcgacctcgctagacaccatgacctagatgaatcaggcgtttcgcaacatcgtgaacatgctgcacggggtgcgtgacgggctggttcgcgacgccaacaactacgaacagcaagagcaggcctcccagcagatcctgagcagctagcgccgaaagccacagctgcgtacgctttctcacattaggagaac

SEQ ID NO: 866 - DNA, 401 bp, Mycobacterium tuberculosis H37Rv
gctatcggcgtccataacagcagacgatctaggcattcagtactaaggagacaggcaacatggcctcacgttttatgacggatccgcatgcgatgcgggacatggcgggccgttttgaggtgcacgcccagacggtggaggacgaggctcgccggatgtgggcgtccgcgcaaaacatttccggtgcgggctggagtggcatggccgaggcgacctcgctagacaccatgacctagatgaatcaggcgtttcgcaacatcgtgaacatgctgcacggggtgcgtgacgggctggttcgcgacgccaacaactacgaacagcaagagcaggcctcccagcagatcctgagcagctagcgccgaaagccacagctgcgtacgctttctcacattaggagaaca

SEQ ID NO: 867 - DNA, 401 bp, Mycobacterium tuberculosis H37Rv
ctatcggcgtccataacagcagacgatctaggcattcagtactaaggagacaggcaacatggcctcacgttttatgacggatccgcatgcgatgcgggacatggcgggccgttttgaggtgcacgcccagacggtggaggacgaggctcgccggatgtgggcgtccgcgcaaaacatttccggtgcgggctggagtggcatggccgaggcgacctcgctagacaccatgacctagatgaatcaggcgtttcgcaacatcgtgaacatgctgcacggggtgcgtgacgggctggttcgcgacgccaacaactacgaacagcaagagcaggcctcccagcagatcctgagcagctagcgccgaaagccacagctgcgtacgctttctcacattaggagaacac

SEQ ID NO: 868 - DNA, 401 bp, Mycobacterium tuberculosis H37Rv
cattcagtactaaggagacaggcaacatggcctcacgttttatgacggatccgcatgcgatgcgggacatggcgggccgttttgaggtgcacgcccagacggtggaggacgaggctcgccggatgtgggcgtccgcgcaaaacatttccggtgcgggctggagtggcatggccgaggcgacctcgctagacaccatgacctagatgaatcaggcgtttcgcaacatcgtgaacatgctgcacggggtgcgtgacgggctggttcgcgacgccaacaactacgaacagcaagagcaggcctcccagcagatcctgagcagctagcgccgaaagccacagctgcgtacgctttctcacattaggagaacaccaatatgacgattaattaccagttcggggacg

SEQ ID NO: 869 - DNA, 401 bp, Mycobacterium tuberculosis H37Rv
taaaactgaacttcagtcgcggcagcacaccaaccagccggtgtgctgctgtgtcctgcagttaactagcactcgaccgctgaggtagcgatggatcaacagagtacccgcaccgacatcaccgtcaacgtcgacggcttctggatgcttcaggcgctactggatatccgccacgttgcgcctgagttacgttgccggccgtacgtctccaccgattccaatgactggctaaacgagcacccggggatggcggtcatgcgcgagcagggcattgtcgtcaacgacgcggtcaacgaacaggtcgctgcccggatgaaggtgcttgccgcacctgatcttgaagtcgtcgccctgctgtcacgcggcaagttgctgtacggggtcatagacgacgagaacca

SEQ ID NO: 870 - DNA, 401 bp, Mycobacterium tuberculosis H37Rv
accgttttggatacactgccctacggcgagtggaaaacacacagcagagtatgacgccagggcgtgaaacccgaagtacaacaacaaatttgagcatcagatacaacccagatacgtacagggcaaattgctctagaatcgactgcaatactgcaaggcaaggtcaaccacaacgatttggtcgcgaggcaaggcaaatgaaatcggagttagtcgagccgcagctcccggtgggctaccgcgcctcggtgcctacaccgacggagctccccgcgccactgaagccacggtgtaacacgtttgccatggcagggggtacaggacgatgaccgcagtagctgacgcacctcaggctgacattgagggtgtggcatcgccccaggctgtcgtcgtgggcgtca

SEQ ID NO: 871 - DNA, 401 bp, Mycobacterium tuberculosis H37Rv
tgatgcgtgccaagacggacgcggatcgacgcgtcgccgacatcatgctgatgagcgcgatcatgcccgtgacggtggcggcggcagcggccccgcccggcccggtgggctccccgcaggccgtgttgggcttcggagtgctgaccgtcgctgcggccctggccctgcggttcaccggtcgccgcctggggatttacaccacaatcgtcatcatcggtgcgctgacaatgcttgcagccttggcgcggatggtcgcggccacaagcgcggtgacgctgttgtcgtccttgttgttgatttgcgtagtggcctaccacgcggcgccggcactgtctcggcggctggccggcatccgactgccggtgttcccgtccgccaccagccggtgggtcttcgaggct

SEQ ID NO: 872 - DNA, 401 bp, Mycobacterium tuberculosis H37Rv
ggacgcggatcgacgcgtcgccgacatcatgctgatgagcgcgatcatgcccgtgacggtggcggcggcagcggccccgcccggcccggtgggctccccgcaggccgtgttgggcttcggagtgctgaccgtcgctgcggccctggccctgcggttcaccggtcgccgcctggggatttacaccacaatcgtcatcatcggtgcgctgacaatgcttgcagccttggcgcggatggtcgcggccacaagcgcggtgacgctgttgtcgtccttgttgttgatttgcgtagtggcctaccacgcggcgccggcactgtctcggcggctggccggcatccgactgccggtgttcccgtccgccaccagccggtgggtcttcgaggctcggcccgacctaccga

SEQ ID NO: 873 - DNA, 401 bp, Mycobacterium tuberculosis H37Rv
ctgagcacgtcggctgcccacgccgagggcgcggccggtctggctcgggccgcggtatcggtgttcgaggaggcgctggccgcgacggtgcatccggcgatggttgcggcaaatcgcgcccaggtggcgtcgctggtagcgtcgaacttgtttgggcagaacgcgcctgcgatcgccgcgctcgaatccttgtatgagtgtatgtgggcccaggatgcagcggccatggcgggttattacgttggggcttcggcggtggccacacagttggcatcgtggctgcaacggctacagagcatccccggcgccgccagtcttgatgcccgtctgccgagctcggccgaggcaccgatgggagtcgtccgcgcggtcaacagcgcgatcgccgccaatgcggctgc

SEQ ID NO: 874 - DNA, 401 bp, Mycobacterium tuberculosis H37Rv
gtctgccgagctcggccgaggcaccgatgggagtcgtccgcgcggtcaacagcgcgatcgccgccaatgcggctgcggcacaaaccgttggcctggtcatgggaggcagcggcacgccaataccgtcggccagatatgtcgagctcgcgaacgcgctgtacatgagtggcagcgtcccgggtgttatcgcgcaggcgctcttcacgccccaagggctctacccggtggtcgtgatcaagaacctcactttcgattcctcggtggcgcagggtgccgtcattctcgaaagtgcgattcggcagcaaattgccgccggcaacaacgtcaccgtcttcggctactcgcagagcgccacgatctcgtcactagtgatggccaatcttgcggcttcggccgacccg

SEQ ID NO: 875 - DNA, 401 bp, Mycobacterium tuberculosis H37Rv
cctgccgctgctagagccactgcgatcggtgccgatcgtggggaacccactggcgaacctggttcaaccaaacttgaaggtgattgttaacctgggctacggcgacccggcctatggttattcgacctcgccgcccaatgttgcgactccgttcgggttgttcccagaggtcagcccggtcgtcatcgccgacgctctcgtcgccgggacccagcagggaatcggcgatttcgcctacgacgtcagccacctcgaactgccgttgccggcagacgggtcgacgatgccaagcaccgcaccgggctcgggtacgccggtccccccgctctcgatcgacagcctgatagacgacctgcaggtggctaaccgcaacctcgccaacacgatttcgaaggtggccg

SEQ ID NO: 876 - DNA, 401 bp, Mycobacterium tuberculosis H37Rv
gccggacccgccgttgccaccgttgccgtatagccatccgccatcgccaccgttttgcccggttcctgcgaccccgttggcaccgttgccgataagcggacgcccggtcagcgtctgcacgggtgaattgatggcatcgagggcggtttggcccacgatttgcaatggtgacgagttggctgcctcggcgctggcgtactgggccgcccccgcgctcatgagctggacgaactgctcatggaatgcgaccgcgtgggcactgagctcctggtatgcctgcccgtgcgttgcgaacagcgccgcaatcgcagccgacacgtcgtcagcgcccgcaggcagtaacgccgttatcgggaccaacgcttcggcgttggcccggctaatcgccgaaccaatagttg

SEQ ID NO: 877 - DNA, 401 bp, Mycobacterium tuberculosis H37Rv
gcccgtgcgttgcgaacagcgccgcaatcgcagccgacacgtcgtcagcgcccgcaggcagtaacgccgttatcgggaccaacgcttcggcgttggcccggctaatcgccgaaccaatagttgctaggtcctttgccgctgcatcgacaaacgccggcgccacgatcatctgcgacgtccacacctcctggccgttgtcgtcgcatggggaatccatacgaccgccaaaggaattttggaaccgacgccaacgttacagttttgcggacccgctatggggtgcattcaccagattcactggcaacgatgtgaaccccgtgtcaccccaagcggggtcaatccactgattactctctagcccaaactatttcgcgctgacgctggttttagtgatctggtgg

SEQ ID NO: 878 - DNA, 401 bp, Mycobacterium tuberculosis H37Rv
ggcgcgctggtggcgccgcttggctcagcgggcgggctaggcggcactgtcgcggccggcctgggcaacgcggccaccgtcggaaccttgtcggtgccgccgagctggacggcggccgcaccactagccagccccttgggctccgcgttgggaggcacaccgatggtggcaccgcccccagcagtggcggccggcatgcccggaatgcctttcggcaccatgggcggtcaaggcttcgggcgtgccgtgccccagtatggcttccgccccaacttcgtcgcacgaccgcccgccgccgggtgatcccgtagggggtgggttccctggaaagcgccagggtcacgatggcgcagccgaatagccgacagtgcttttctctgcgaataccggagttggtcgcg

SEQ ID NO: 879 - DNA, 401 bp, Mycobacterium tuberculosis H37Rv
gcagaactacgcgagcgtgattagcatggcggccatcgaggggaccggaggtcagggatgttggatttcggggcgctaccaccggagattaattcggggcgaatgtacgcgggtccgggatccggaccgttgctggccgccgcagcggcctgggatgcgctagccgccgagttgtactccgcggcggcgtcctatggctcaacgattgagggcctcaccgtagcaccgtggatgggtccctcctcgatcacgatggccgccgcggtcgctccatatgtggcgtggattagcgtcaccgccggccaggccgaacaggcaggggcccaggccaagatcgctgcgggcgtttatgagacggcatttgcggcaacggtgccgccaccggtaatcgaggccaaccg

SEQ ID NO: 880 - DNA, 401 bp, Mycobacterium tuberculosis H37Rv
aagcatcaccactatcttggcgaacctcactgggccgtacagcatcatcgggctgggcgctatacctggcggctggtggctgacgttcggccagatcctcggcctagcccaaaacgccccaggtgtggccgccctactgggcccgaaagccgccgccggcgcgttgtcgccattggcgccgctacggggcgggtatatcggagatatcacgcctctcggtggtggggccacagggggcatcgcccgtgcgatctacgtcgggtcgctctcggtcccgcagggctgggccgaagccgcaccggtgatgagggcggtcgcatcggtattgccgggcaccggcgccgcccccgccctggccgccgaggcaccaggtgccttgttcggcgagatggccctgtcga

SEQ ID NO: 881 - DNA, 401 bp, Mycobacterium tuberculosis H37Rv
tggcgaccaacattttcggacaaaacaccgccgcgatcgcagccaccgaagccgaatacggcgaaatgtgggcccaggacaccatggcgatgttcggctatgctagctcctcggcgaccgcctcgcggctgaccccgttcactgcaccgccgcagaccaccaacccgtccggacttgccggccaggcggccgcaacggggcaagcgaccgccctagcgagcggcaccaatgcggtgacaaccgcgctttcgagtgcagcggcgcagtttccgttcgacatcatcccgaccctgctgcagggcctggccacactcagcacccaatacacccaactcatgggccaactcattaacgccatcttcgggccgacgggcgcaacgacctatcagaacgtgtttgtc

SEQ ID NO: 882 - DNA, 401 bp, Mycobacterium tuberculosis H37Rv
cgctgagccggtcaagctggaggctgtcatcgcgcagctacaaaagcaaccggacgcagtgcgacactggaatgtcgataaggccgatcttgatggcctgctggatcgattgtcgaaacagcccggcatccacgcggtacacgtgtcgaacggcgacaaacccaaggttgccttgcccgatactcagttgggttcacactgaacgtgattcgaaatccacactgatactggaggtgattaccggctgaagcaaagcgcattggaaatccaggcttagaccattgccatgtggccgtgagattcgtcacgtcttgacatccgcgtccggcgggtcaccttcgaccgcggtcaatgtcattggtaggtaagggctttgctgtactgatggccgaattttgact

SEQ ID NO: 883 - DNA, 401 bp, Mycobacterium tuberculosis H37Rv
ctgtgcactggtatgccggtgagcacgcgcaggccgaatgacccacgacactaggggcggggctgtactcgcggcgcggccgcagccagcaagtctgcccgactgccgttcagcggcgggtagatccgccgggtattgattgactgcttggtggtcttggccggtgcgccctgcgataccactttgcgttcccatccctcggtgtacaccgcgcccgccgatcctagatcgagaaccgtgacataccaagggatccgaagagccagcaacggttggtcgaacagatcgttgatgacgttgcagccggcatagcggcccatcgggcgcccatgctgacacgacatgaccgacaggtgctcgtcatccatccgggccgcggccacatcgccagcagcaaacat

SEQ ID NO: 884 - DNA, 401 bp, Mycobacterium tuberculosis H37Rv
gcagatcgtcgggatcttcaacagcgtctggggcggctttcccgcggcggtgtcctggcggtcgacgtccgagcaggttcacgcggatctcggcgtgacgccccttgcttagcaagcaccccgttagcggccaccaggttgatcgccgtgtgtttgctagagcggtgatctcggttgtgtcagacttgccgcgtgggcaaacgccgggatgcgagggaacagatcgaggcgaaaattgtcgaactcggccgtcgccagctgctggatcacggcgcggccgggttgtcgcttcgggcaattgcccgcaacctgggcatggtgtcctcggccgtataccgctatgtgtccagtcgtgatgagctgttgactttgctgctcgtcgacgcctactccgacctggc

SEQ ID NO: 885 - DNA, 401 bp, Mycobacterium tuberculosis H37Rv
gaatgccacaccgtcaccgccaacaccgcccaccccgccggcgccgaacaggagcccgccattgccgccggccccgccggcaccgccggtgacattagtgccggtgccgccggccccgccggcaccgcccacgccgaagaacaacccgccgtctccgccggccccgccgtcaccggcgtcagccgcgagtccgccgacgccgccggccccgccggcgccgaacagcagcccgccattgccgccggccccgccggccccaccaataccgcccaccccaccaccggcgcgtccgccggcgccgccggccccgccggcgccgtagagcagcccgccggccccgccggccccgccgaaccctgcggtgccggacgctacgttccccccggcgccgccggccccgc

SEQ ID NO: 886 - DNA, 401 bp, Mycobacterium tuberculosis H37Rv
cagcgcctgataggcctgggcgtgtccggagaacaatgccgccatcgccgccgacacctcatcggcggcggcggccaacaccgtcgtggtcgggaccgcggcggccgcgttggcggtgccgatcgtcgacccgatacccgccaaatcggtcgccaccgccgctagcgcctccgggatcgtgaccacaaatgacatctggcacctcgtcaacaccctgtggccccggcgcggggccgctaccgatcgcctggtcactccccagagatcgacggattcagcgtatcgcgatcacggaagcggccacgccgatttgggaagctcgtcccggcttacacttcggcgggcgccgcctcgactggggccagccgccattggccgccaccgagtagttcgagctggtt

SEQ ID NO: 887 - DNA, 401 bp, Mycobacterium tuberculosis H37Rv
atcgcctggtcactccccagagatcgacggattcagcgtatcgcgatcacggaagcggccacgccgatttgggaagctcgtcccggcttacacttcggcgggcgccgcctcgactggggccagccgccattggccgccaccgagtagttcgagctggttttcgtgcagccgctcgagggcggggcgatggctgacgctgatcacgatgcagtccggcagctcgctgcgcagcaattggtagagcgcaaactccagcccggtgtccagcgccgaggtactttcgtcgaggaagaccgccttgggtttggtgagcaggatgcgagcaaaggcaacacgttgctgctcaccgggggagagcaccttggcccagtcgcgttcctcgtccagccggtcacacagtg

SEQ ID NO: 888 - DNA, 401 bp, Mycobacterium tuberculosis H37Rv
cggggttgtcgatcgtttcgtcgatgaacaggtctcggtagtaggccctgccgtcgagccagtcttgtgtgaggtggtgggttagccagaccctccaggcgatgatgaagcgctgcgtcaagtagatgtcggccatgacccgggtcacgtgcagcacggccatcacgctgaaaaccccgatcgacatccaaaatcctcgcacgcctgagcgtttgaccgtgccatcgccagaggcgatgccctcgaaggccttctgcaaggccgtgtacatgtcgttgccttggtagctgaatagcacattcaggcgcactgccagcactaccgaaagcaacaacacgccgagcatcagccacacgcgaacgctgttggggccaacgaagtatgcgcgggtgatccgccag

SEQ ID NO: 889 - DNA, 401 bp, Mycobacterium tuberculosis H37Rv
atcgcgcgccgacttaaagccagtggtatcgacacggtcttcacgttgtcgggcggccacctgttttccatctacgacggctgccgtgaggagggcatccgcctgatcgacacccgccacgaacaaaccgccgcctttgccgccgaaggctggtcgaaggtgaccagggtgccgggcgtggccgcgctcaccgcggggccggggatcaccaacgggatgagcgcgatggcggcggcccagcagaaccagtcaccactggtggtgctcggcggccgggcgccggcgctgcgctggggtatgggctccctgcaggagatcgatcacgtgccgtttgtggcgccggtggcccgcttcgccgctacagcgcagtcagccgagaacgcgggcctgctggtcgatca

SEQ ID NO: 890 - DNA, 401 bp, Mycobacterium tuberculosis H37Rv
acacgagtggattcgccgcagtggcgacgacaccgtccgggtggggatcaccgactatgcacagtcggcgcttggcgacgtcgttttcgttcagctacccgttatcggcaccgcggtcaccgccggcgagaccttcggcgaagtggaatcgacgaaatctgtgtcggatctctatgcgcccatttcgggtaaggtgtctgaggtcaacagcgatctggacggcactccgcaattggtgaattccgacccctacggagccggctggctgctggacatccaggtcgacagctcggatgtcgctgccctggagtcagctttgacgacactgctcgacgctgaggcctaccgcggcacactgaccgagtgacgattgctaaggtccctgccagcgtcacgtggga

SEQ ID NO: 891 - DNA, 401 bp, Mycobacterium tuberculosis H37Rv
acggtgatcgatacctgccgatctggatcggccagtcggaggctgccgctatcgcgctggagcagcaaggcgtcgagccgccacgtccgctgacccatgatctgatcagggatctcattgctgcgctggggcattcgctcaaagaggtgcgcattgtagacctgcaggaaggaactttctacgctgatctgatcttcgaccgcaatatcaaggtgtccgcccgtccctcggactcggtggcaatcgcattgcgagtgggtgttccgatctacgtcgaggaggccgtactagcccaggccggtctgctgattcccgacgaaagtgacgaggaggccaccaccgctgttcgcgaggacgaggtggagaaattcaaagagtttctcgacagtgtgtcacctgac

SEQ ID NO: 892 - DNA, 401 bp, Mycobacterium tuberculosis H37Rv
ggcgagcagccacgtcaagaccagctcgactttgctgaccacacgggcactgctggtgatggtaacgacggcgccgctgcggccagcggacccgtgcagcccggcctgttccccgacgattccgttcctgacgagttggtaggttatcgcggaccgagcgcctgccagatcgctgggatcacctaccgccagctcgactattgggcgcgcacatcgttggttgtgccgtcgatccgtagtgcggcaggatccggcagccagcggctgtactcgttcaaggacatcttggttctcaagatcgtcaaacggttgctcgacaccggtatctcgctgcacaacatccgggttgcagttgaccatctgcgccagcgtggcgtccaggatctggccaacatcacctt

SEQ ID NO: 893 - DNA, 401 bp, Mycobacterium tuberculosis H37Rv
gctcgacgagggcaccgcggcggccgaggccatgactttgatgcaccgcgcggcccgcgggccggtgaagagggtggtcgtggacgccgacgtgttcacccagaccgcggcggtgctggccacccgcgccaagccgctgggtatcgagatcgtcacggccgacctgcgcgccggtctgcccgacggcgaatttttcggcgtcatcgcccagctgcccggggccagcggccggatcaccgactggtctgccctggtgcaacaggcccacgaccgtggcgcactggtggccgtcggcgccgacttgttggcgctgacgctgatcgcgccgcccggagagatcggcgctgacgtcgcctttggcaccacacaacggttcggagtgccgatggggtttggcggcc

SEQ ID NO: 894 - DNA, 401 bp, Mycobacterium tuberculosis H37Rv
acgacaagtacttcgacacggtgttggcccgggtgcccggtcgtgccgacgaggtgctggccagggccaaggccaacggcatcaacctgtggcgtgtcgacgccgaccatgtgtcggtagcctgcgacgaagccaccactgacacccacgtggcggtcgttctggacgcgttcggtgtagcggccgccgcacccgcccatacggacatcgcaacgcgcacatcggagttcctgacgcatccagcgttcacgcaataccgcaccgagacgtcgatgatgcggtacttgcgtgcgctggcggataaggatattgccctcgaccgcagcatgattccgctcggctcgtgcacgatgaaactcaacgccgccgccgagatggagtcgattacctggcctgaattc

SEQ ID NO: 895 - DNA, 401 bp, Mycobacterium tuberculosis H37Rv
tgggcatacatccggatgatgggggctgagggactgcgggcggcatcgctgacagcgatcacgtcggctaactacattgcgcgccgccttgacgagtattacccggtgctgtacaccggcgagaacggcatggtcgcccacgagtgcatcctggacttgcgcggtatcactaagttgaccggtatcaccgtcgacgatgtcgcaaaacggctggcagactatggttttcacgcaccaacgatgagttttccggtggccggtacgctcatggtggagcccaccgagagcgagagcctggccgaagtggacgccttctgcgaggccatgatcggcatccgcgccgagatcgacaaagtcggggccggggagtggcctgtcgacgacaatccgctgcgcggcgc

SEQ ID NO: 896 - DNA, 401 bp, Mycobacterium tuberculosis H37Rv
cctgctgatcagctacctcgacgagcggatacggcacgcgcagcgctggcatggcgcggtccgcgattggcccaaaccgcttgggttcgtgtggggactcgacgatccggtggcaacaaccaacgtgctcaatggactacgggaattgcgccccagcgccgccgtcgtggaactgccagggttgggccactacccgcaggtcgaggctcccaaagcatatgccgaggccgcgctatcgctgctcgtcgactagccggctacggctgtatcacgggcagatcgatgcgagaggcatgcatccggctacggtagacgcgcacggtcggtgcgcaaccgggaaggatggcgaagtggcttgcgtccgcgccggcgatggcgatgcggatgcggtgccccggttg

SEQ ID NO: 897 - DNA, 401 bp, Mycobacterium tuberculosis H37Rv
ggtagctgccgccgctgagctgtgcgacggcttcccaggttgcccgatcgggatcagcaccgaagtcgatgatgttgaccgcgatcggcttggccgggtctgcgctcttgcggatgaaatcctgcaggcccggcccgtcgagggtttggtccgtatgcggccccgcggtaataaccagcacagaattagcctggccaacacggtaattggctagcatctcctgatagatcaagcgcagagtggtgaacgacaccgcgccaccgcccgaggagtattgcttgcccaacgcggccgtcaaggccgcggggcggggctggccgttgaccgggtcggccaatggcccggccggcacctctgttcggccctcgcggccgtcgaatgtccacagtccgacgaccgaa

SEQ ID NO: 898 - DNA, 401 bp, Mycobacterium tuberculosis H37Rv
ggcatcggagccggccgaggtgacagccactgccacacaacggtcgccgaccgggcccgccgacgcgttgtagctgtcggctgactcctttacctgatcggcgattgatgggtcggctataacagcgacggtgtccttgccgcccacgcagcgggcggcagccgtatgcgagcggttggacaacgcgtcaccgaagaagcgccacaagatcaccccggccaccattaccaccactgcgacaagggccacgatcacgccgatactgactccccgccgcccgtccgcgctacggtgcccggcctgccagtcgccgggcccccgatgtccgaagcgaaacagcggcggcggggcggccgctatgggctcggcacccgttggctcccagtcggggcggggtggaa

SEQ ID NO: 899 - DNA, 401 bp, Mycobacterium tuberculosis H37Rv
gtgacggcagtggccttgccctgctcggccagcgcttcgaggcggtcacgacgcgccgagatcaacgcgaattccgcgcccacgaagaacgcgttggcgccgatcagcaaaagcgccagcaacaccgcggacagcacatccatcagcggccccgccccgacccggggtcggcatggccgcccattttgatcaactccaacaagtcgatccggcgcccgtccatctggatcacggtggctaaccaccgcatcgagtcgtcgggaagtccgtcctggtccaaggcagtcagctcgaccgtttcgccggccaccgggatgtggccgagctctcgaagcaccaacccgccgatcgtctcgtacggaccgtcgggggctcgatagccggtggcgctggccacctcg

SEQ ID NO: 900 - DNA, 401 bp, Mycobacterium tuberculosis H37Rv
tcgaacgggttgtccgcgccggtccgggccaccaccgcccgcttggatgccatgccgtagctctccttgtacggctgatcgtcgcggtcacgcatcaggtctccgggggattcgtaggtgccggcgaaccacgatccgatcatcacgttcgaggcgccggcggccagcgccagagccacgtcgcgtggatgccggatcccgccgtcggcccagatatgaccaccgagctgccttgccgcagaagcgcattcgagcacagcggagaactgcgggcggccgacaccggtcatcattcgggtggtgcacatggcgccggggccgacaccgaccttgacgacgttcgccccggctttcagcagatcccgggtgccctccgccgacaccacgtttcccgccgccag

SEQ ID NO: 901 - DNA, 401 bp, Mycobacterium tuberculosis H37Rv
ccatccgccgcccggctaccgcggtcatattggcgaccactaccggaatggtggtgcccgagccgtcggcggtggacaaatcgacgtcgaagcgcgacgcgacctcggatcggttcggaacgatgaacacgtcgttgtatgtcaggtcgtacccgggtgggtgcccgtctagaaatctcatcacttacccctttacccccttttagttctagcccgctacaccggtacttcggtgcggtctgaactccatagtgtgtggaacttgcctggttcgtcgatccggccgtaggtgtgtgcgccgaagaagtcgcgctgggcctgggtgagtgcagcgggcagccgcgcggtgcgcagcgcgtcgtaatacgacagggccgacgagaatcccggggtcgggatac

SEQ ID NO: 902 - DNA, 401 bp, Mycobacterium tuberculosis H37Rv
cagccagcagcaccgcgaggatggtgaaggccagcgcggacacgccgttagtctccctcaagtctccgttgccgcgccagccggtggccgattgccatgaccggcttccaattcggcgagcgcacgtcgtagcgcatccgcctcgtcggcaccgactcgctcgacgaagtgcaccagcgcggcttgcctgctgccggagtcctcggcctgagccaatgcatcgaccatcagcccggcgaccaattcgtcgcggccgtgcacgggagcgtagcggtgggctcgatcgtcgcggatctgcagcacgaggttcttctttgccaaccgttgcagcacggtcatcaccgtcgtgtaggcaaggtcgcggcgcgccgacaacgcttcgtggacttggcgaacggttt

SEQ ID NO: 903 - DNA, 401 bp, Mycobacterium tuberculosis H37Rv
gacagcgagttgggtttgcaattcaccgaactgggtcccgacggggcccgagcgcagctcgacgtccggcccaagttgttgcagctgacgggcgtcgtgcacggcggtgtctactgcgcgatgatcgagagcatcgccagcatggcagcctttgcctggctcaattcgcacggcgaaggcgggagtgtggtcggcgttaacaataatacggatttcgtgcgctccatcagctcagggatggtgtatggcaccgccgaaccgctgcatcggggtcggcggcaacagctgtggctggtcaccatcaccgacgacaccgaccgggtggtcgcccgcggccaagtgcggctgcagaacctcgaggcgcggccttaacccgctcgaaaccgttgaacctgccgcgg

SEQ ID NO: 904 - DNA, 401 bp, Mycobacterium tuberculosis H37Rv
tgcaattcaccgaactgggtcccgacggggcccgagcgcagctcgacgtccggcccaagttgttgcagctgacgggcgtcgtgcacggcggtgtctactgcgcgatgatcgagagcatcgccagcatggcagcctttgcctggctcaattcgcacggcgaaggcgggagtgtggtcggcgttaacaataatacggatttcgtgcgctccatcagctcagggatggtgtatggcaccgccgaaccgctgcatcggggtcggcggcaacagctgtggctggtcaccatcaccgacgacaccgaccgggtggtcgcccgcggccaagtgcggctgcagaacctcgaggcgcggccttaacccgctcgaaaccgttgaacctgccgcggcgtggcaggatcgcag

SEQ ID NO: 905 - DNA, 401 bp, Mycobacterium tuberculosis H37Rv
gaggtcgatcccgacaccttcaccgtgcgaatcgacggccaggtgtggcaaccgcagccggccgccgaactacctatgacacaacggtatttcctgttctaatgacctcgctggccgtgctgctcaccctcgccgactcgcggctgcccacgggtgcgcacgtgcactcgggcggcatcgaagaagccatcgccgccggcatggtgaccggcctggccaccctggaagcgttcctgaaacggcgggtccgcacccacggcctgctgacggcgtccatcgcggccgcggtgcaccggggcgagctggccgtcgacgacgccgaccgggaaaccgacgcgcgcacaccggctcccgcggccagacacgcctcacgcagccagggccgcgggctgatcaggctg

SEQ ID NO: 906 - DNA, 401 bp, Mycobacterium tuberculosis H37Rv
ttcggccttgatcgtgctggcgacgtatttcgccccctggatggcgccctgcgccacacccggcacaccctccacagcggccatatcgcccaccacgaacacgttcgggtacccgggaatggacaggtcgggcagcacttggacccggccggcccggtcgagctcaacccgtgattgctcggcaaggtccctgcccaaccgactggccgaaaccccggccgaccagaccttgcaggccgactcgatgcgccggacggtgccgtcggagtccttgacggtgatgccgttgcggtcgacgtcggtgaccatcgcacccagctggatttccacgcccagcttctgcaaccgggcagccgcccgctgaccgagctttgcgcccatcggtggcagcaccgccgggg

SEQ ID NO: 907 - DNA, 401 bp, Mycobacterium tuberculosis H37Rv
gagaagttggggatctgtagacccagccgaatagtcacactacctaccgtagcgatcggccggtgaagcgaaaggttcagccgaagtgagccagcgcgccgtggctgacgtgcagcgtctggccggtgatgtggcgagccgcaggggtggtaaggaacagcgccagccgcgcaatctcggccgcgacgggcgcgggtgtgcgcgaaagcccttcgtaaccggtctgcacgctgcggccgcaagcgactgtattgatggtgatcccgcgcgtgccgaaaacggcggcctggcccgcgatccaattcgagagggccgctttgatcgcggactcggcgccaccggcaggcgggttctccgccaccacgctgacaatcgagccgccggagcgcaggtgatcgccc

SEQ ID NO: 908 - DNA, 401 bp, Mycobacterium tuberculosis H37Rv
aacagcgccagccgcgcaatctcggccgcgacgggcgcgggtgtgcgcgaaagcccttcgtaaccggtctgcacgctgcggccgcaagcgactgtattgatggtgatcccgcgcgtgccgaaaacggcggcctggcccgcgatccaattcgagagggccgctttgatcgcggactcggcgccaccggcaggcgggttctccgccaccacgctgacaatcgagccgccggagcgcaggtgatcgcccacggattgcaccgtcagcaccaccgagagcaccgtcgcgtcgagcgcattgcgccaggcgttggccgtgtcggacaccgagtaggcgcgcgggtcaccggcatcccaggacggcgctggcacgttgacgatggtgtccaggtgacgggggaacag

SEQ ID NO: 909 - DNA, 401 bp, Mycobacterium tuberculosis H37Rv
gaccattggtccggacggctcgctgcgcacccagtccggcgcccactggtacggcaccccggtccaggatttgcctactgggcatgaggcaatcgcggtgttcccgccgacggcggtggcggtgtatccggaaccgccgcacggaagcccgcgcaatatcgtcgggctgacggtggcggaggtggatacccgcggacccacggtcctggtgcgcgggcatgatcagcctggtggcgcgcctggccttgccgcatgcatcaccgtcgatgccgccaccgaactgcgtgtggcgcccggatcgcgcgtgtggttcagcgtcaaggcgcaggaagtggccctgcacccggcaccccaccaacacgccagttcatgagccgacccgcgccgtccttgcgtcgcgc

SEQ ID NO: 910 - DNA, 401 bp, Mycobacterium tuberculosis H37Rv
ccgcagcggaccttaccggcctgaccggatccggccgcaccccaagtgatacccctgggcggggtgtcagcgcggccgggcgctcttgagccggcgcagcggcgtccatggagcgccgccggccaacgcggcgttcttggcgccggcgcgaacgttgttcaggtgccaaccggtggtgggtcgtggttggcgacttgtacagcttccggttctccataggtcgcgccggggacgggcagcgggtcgtgtgcgcgtctttcagtgcaccgtgcgaaacgccgacaccgttgaactccacctgaaagcaccgctgaacagcagaaaagcgcccacgaaaacaccgtggggcgccacacacgtttgatcacgccacaacccaccgacaccgtcactaccctcaa

SEQ ID NO: 911 - DNA, 360 bp, Mycobacterium tuberculosis H37Rv
gcaagatcgttaaggggggcggctcgggcatcctgatgaacgttgtgatcggcgtcgtcggggcattcggcgccggcttggtccttaacgcgctgggcgtcgacgtcaaccatggcgggtactggttcaccttcttcgtcgccctgggcggggctgtcgtcctgctgtggatcgtcggcatggtgcgcaagacctagcgccaaactgttgtcggccatgcaaattgagtgtgactgcggcggccggcgacggtagcggcatgatggagtgatggtctcaccggcgaccacggcgacgatgagtgcgtggcaggtgcgtcggcccggcccgatggacaccggcccgctcgaacgagtgacc

SEQ ID NO: 912 - DNA, 401 bp, Mycobacterium tuberculosis H37Rv
atacatgtgatgacacgcggggcccgcgcgcgcaagctggcgctgcaacttggcgctgcatcggctcaggacgccgccgaccggccacccgtgccgctggacgccgcgatcttattcgccccggtcggggatctggtgctgcccgcgctggaagcgctggaccgtggcggcatcttggcgatcgccgggatccacctgacagatattccggacctgaactaccagcagcacttgttccaggagcgtcagatccggtcggtcacgtcgaacacccgcgccgatgcgcgcgcgttcttcgacttcgccgcccagcatcacatcgaggtcaccacgccggagtacccgcttggccaagccgatcgtgcgctgggcgacctgagcgccggccgcatcgccggtgc

SEQ ID NO: 913 - DNA, 401 bp, Mycobacterium tuberculosis H37Rv
gccttagccgccgtccaatgcggtcgcgcccgtgtagtcacggtagccgcgaacgccgatgaaacagctacggtgtgcacgtgcccgaacgattgctcgatgccgtgcgtgtgctcgacttgtccgacggctgttctgctggaggcaccgatatggtgacacgactgctcgccgacctgggcgcagacgttctcaaggtggaaccccccggcggcagcccaggacgccacgtgcggcccacgctggccggcaccagcatcgggttcgccatgcacaacgcgaacaaacgcagcgcagtgctcaacccgctcgacgagagcgaccgtcggcggttcttggacctcgccgccagcgccgacatcgtcgtcgactgtggtcttccgggacaggccgccgcgtac

SEQ ID NO: 914 - DNA, 401 bp, Mycobacterium tuberculosis H37Rv
tgctcttcgtcgccgaacaagataatccgaccgccgaagtcgctgcggcgcaacgcctctacggctttagccccggcaagtcccccgccaacaatgacgaacgtggttgagctggccataattgctgctccgtcctgttgtgtgcggtgccgcttgacagcctacgagccggtcgcgtacctgggtcaaccggtcacctgcaggcgcagctcgtcgtcttacgccactcgcactaacgcagcagcgagcagcgcattggagctgggtgccaccgacgccagcttcttcgggtcagtgggcaagccgagctgcttcgccgcggcggtggctcgatcgtcgaaatacggtcgtacccagatccagacgtcttggacctcgcgtaagaaaatgtcggcaccggt

SEQ ID NO: 915 - DNA, 401 bp, Mycobacterium tuberculosis H37Rv
agataatccgaccgccgaagtcgctgcggcgcaacgcctctacggctttagccccggcaagtcccccgccaacaatgacgaacgtggttgagctggccataattgctgctccgtcctgttgtgtgcggtgccgcttgacagcctacgagccggtcgcgtacctgggtcaaccggtcacctgcaggcgcagctcgtcgtcttacgccactcgcactaacgcagcagcgagcagcgcattggagctgggtgccaccgacgccagcttcttcgggtcagtgggcaagccgagctgcttcgccgcggcggtggctcgatcgtcgaaatacggtcgtacccagatccagacgtcttggacctcgcgtaagaaaatgtcggcaccggtgtcgccgattccgttgaaa

SEQ ID NO: 916 - DNA, 401 bp, Mycobacterium tuberculosis H37Rv
gccagcgatccagtgaagcgaaggccagcggttcggtggtcaacaagtcgaaccaccaccgcgggtgtcccatcgcgtcgagaacggttcgcagcgtcagcgccggcgggatggacatcccgttgcggacatcgcgtagccgggcaccggcgaccgggacgtcgaccgtgaccagcatggtgtcaaatcccgcggcggcgacgcgccgcaccaatgccatcgagcggtctcgatcacgccacatatacagctggaaccatttgcggccctgcggcacagcgatgacgaggtcttcgatggcacaggtggccagggtggatagcgaaaacgggatcccagccgcggccgccgcccgcgcgccggcgatctcgccctcggtgtgcatcaagcgggtgaacccg

SEQ ID NO: 917 - DNA, 401 bp, Mycobacterium tuberculosis H37Rv
cccgcgcgccggcgatctcgccctcggtgtgcatcaagcgggtgaacccggttggcgcgatcccgaatggcaagacggtgggctgaccgaggacgttccagccggcgcacacggtggtgacgtcacgcaggattgtcgggtgaaactcgatgtcgcggaacccttgtcgagcacgcgcgatggacagttcgtcctcggcacccccgtcggcgtagtcgaacgccgccctaggggtacgccgtttggcaatgcgtcgcaggtcctggatggtcagcgcggcgcccaggcggcgcttggaggtgtcgaactgcggcctgttgaactggagcaggggtgccagatcgcgcactctgggcactcgccggttgaccgccatccgtttatctaaccagtttgatatg

SEQ ID NO: 918 - DNA, 401 bp, Mycobacterium tuberculosis H37Rv
tcgaactgcggcctgttgaactggagcaggggtgccagatcgcgcactctgggcactcgccggttgaccgccatccgtttatctaaccagtttgatatgaagtcagcaagcgacccgttcgacctgaagcgtttcgtgtacgcgcaggctccggtctaccgcagcgtcgtcgaggagctgcgcgccggacgaaagcgcggtcattggatgtggttcgtcttcccacaactccgcgggctaggtagtagcccactggcagtgcgctacggcatctcctcgctcgaggaagcccaggcctatctgcagcatgacctgctcgggccccgcttgcatgagtgcaccgggttggtcaaccaggtgcaaggccgctcaatcgaggaaatcttcggcccgcccgacga

SEQ ID NO: 919 - DNA, 401 bp, Mycobacterium tuberculosis H37Rv
gtcattggatgtggttcgtcttcccacaactccgcgggctaggtagtagcccactggcagtgcgctacggcatctcctcgctcgaggaagcccaggcctatctgcagcatgacctgctcgggccccgcttgcatgagtgcaccgggttggtcaaccaggtgcaaggccgctcaatcgaggaaatcttcggcccgcccgacgacctcaagctgtgctcgtcgatgaccctgttcgcccgtgccaccgacgccaaccaggactttgtcgcgctgctcgccaagtattacggcggcggagaggaccggcggacggtggcattactggcggtcacatagaccgcgcgatccaccggggcgtcgacgcctgacagcggatgtaggttcgggctcatggagaaggtg

SEQ ID NO: 920 - DNA, 401 bp, Mycobacterium tuberculosis H37Rv
ccgggagaaacaggacaccaccagcgccgtactgctggagaaaatcgttgccgacgaggaagaacacatcgactacttggaaacgcagctggagctgatggacaagctaggagaggagctttactcggcgcagtgcgtctctcgcccaccgacctgatgcccgcttgaggattctccgataccactccgggcgccgctgacaagctctagcatcgactcgaacagcgatgggagggcggatatggcgggccccacagcaccgaccactgcccccaccgcaatccgagccggtggcccgctgctcagtccggtgcgacgcaacattattttcaccgcacttgtgttcggggtgctggtcgctgcgaccggccaaaccatcgttgtgcccgcattgccgacga

SEQ ID NO: 921 - DNA, 401 bp, Mycobacterium tuberculosis H37Rv
ctcggcgccagtccggtgtggcataccttctgtatcgaccaatgcagtattgcattcaccgcagacatcagtgtggtcggcgatcaacgtctccgcatcgatctgtccgccttgcgcatcatcggcgacgggttggcgtgggcgcccgccgggttcttcgagcaggacggcacaccggtccccgcctgcagccgaggaacactgagccggatcgaggccgcgcttgctgatgccggcatcgacgcggtaatcggccacgaagtcgaattcctcttggtcgacgcggacggccagcggctgccttcgacgctgtgggcgcagtacggtgtcgccggggtgctcgagcacgaggcgttcgtccgcgatgtcaacgccgcggcaacggcagcaggcatcgctat

SEQ ID NO: 922 - DNA, 401 bp, Mycobacterium tuberculosis H37Rv
ccgccgatcagctggtgctgacccgcctcatcatcggccgtaccgcccgccggcacgggttacgcgtgagcctatcgccagcgcccttcgccggaagtatcggatccggtgcccaccaacacttctcgctgactatgtcggaagggatgctgttctccggtgggactggagcagctggcatgacctcggccggggaggccgcggtggcaggagtgcttcgcggactaccggacgcccaaggcatcctgtgcggatcgatcgtgtccggtctgcgaatgcgacccggtaactgggccggaatctatgcatgctggggtaccgaaaaccgggaagcggcggtgcgattcgtcaagggcggggctggcagcgcgtacggcgggaacgtggaggtgaaggtcgtc

SEQ ID NO: 923 - DNA, 401 bp, Mycobacterium tuberculosis H37Rv
atcctcggactggcactcgacggcatgaagaccaaggcggtgttgccgtcggaaacgaccgtagacccgacacagctgtctgacgtggatcgtgaccgtgccggcattctgcgacttgctgccgatcaggcggatgcaattgctgtactggatagttcgaaactgcttcggtgcatccttggcgatcccgtggtagatgccgtggtcgcggtacgccagttagagcatgagcgctacggtgacctcgatcctgcgcagctggccgacaagttccggatggcttggagtgtgtaacgatggccgactccgccggttcggacctgacgcggcacacggccgaagtgccgttgatcgatcagcacgtccacggatgctggctgaccgaggggaaccggcggcgg

SEQ ID NO: 924 - DNA, 401 bp, Mycobacterium tuberculosis H37Rv
cgtcggacggattcggccccgcggaactgcactttctcggtgcaacgttgtggcgcagtggaattcagcgtgttctgcgtggctttgtcgagcgcgacgactggtgcgagaccgatgccctgcgggtggtcgacctaattgcccatggcactgccgcacgcatctatcgccttggcgatcggtagctttcaggtggcgcaagtgtggccccgtcacgggctaaccatggaccgtgccggacccagtgtcaccggcagcgtcgaccaaccgcgcagcacccgcgtgtcacgccgacttccggcacccgcggcccgcacatcggggaagcggtcgaagaacgttctcagcccgacctcgccttcggcgcgggccagggcggcccccaggcagaagtggcggcc

SEQ ID NO: 925 - DNA, 401 bp, Mycobacterium tuberculosis H37Rv
agccaccacttaatcagcaccaggccgcggctcaaccgctccggatagtcaacctccaagtcagccggatactccgcctttgtctgcaggctgaagggcgggtaccggtcggttcccagcgccgacagcgcatagaaggcaacccgccagcgccaccgcatgacgccgacattgaagtcgaacagcgtccggggatatctgcccgtgaacaggatggcaaagaacgcgatcacggtgaccaccacggcggcaacgtgcaagaagaacaagacaatgtagtgcgggatggccaaaaaccacttgactagccactgccaacgtgacaacgcaggatcgaggtcaccccggacccggactggataggcgtcaggttgcatgatcgacggctcctttacatgcgc

SEQ ID NO: 926 - DNA, 401 bp, Mycobacterium tuberculosis H37Rv
gtgtagtcatctcatcagccttccagcattacggtcaccggaccgtcgttgaccagttcgacctgcatgtgggcaccgaacacgccggcttccacgtgcgctcccaactggcgcagcgctgccgcgaacgctgctatcaggggctgcgccaccgcacctggcgccgcggcgttccaggacggtcgccgacccttcgcggtgtctgcgtagagggtgaactggctgattaccaggatcggtgcgtgcatgtcggaggcggatttctcgtcggcgagaacccgcaaattccagagcttttcggcgagacggcgcgccttgtcgagatcgtcgccgtgggtgacaccgacgaacgcgaccaggccctgcccgtccggccggatagcgccgaccacccgaccatc

SEQ ID NO: 927 - DNA, 401 bp, Mycobacterium tuberculosis H37Rv
cgtcgagctcgagcttggtcacgtcggcctgatgtacctccaactcgatcatcgacacattgtcccccctgcaagtactcggcggccgcggtgatgcaccccttgttgtgttggaccgtcgccaccatcgcccacacaatcgaaccctcgcccggcgccactgcggcccatcgagactccggcccatcgagcccagattcagggtagcttgaggtgaacgaggacaatcaagcggctggcaaggacacagaccgatggctcgtgatccagttgtaccgagggtgcgaacagcatgagtggcgacgacgccgggccgggcgaggtcagccatgcccgcggcgtcggtgggccgggcggagccggaggcgccggtggccggggtggtgccggcggtcgcggcg

SEQ ID NO: 928 - DNA, 401 bp, Mycobacterium tuberculosis H37Rv
tcgatccgacacggtgcaagatcagtgttggagcctcgatgtgtcccaagacatctcgtacgtcggcctcggctatgacctttgaaacggcacgggcaatgctcggcggtccggcacggttgccggcgagatcccaccaggctcgaaacacgtcatctccggccacggtaggagccacgatgctcagcacgtcgaagccccgctcgacggcatccggttccagcgccaccgtcaggaacgggtcagctcgacgaacctgggcgcctaccgggtagtcgggcgcccatagtgggcgcgccgagccgttgacgacgatcaggctgcgcacccgctcggggtagtcggcggcgagaacaagtccgttcatggcgtggaaactgggcgcgaaaattgtcgcctgc

SEQ ID NO: 929 - DNA, 401 bp, Mycobacterium tuberculosis H37Rv
ggtgccggtccttcgagcacacggccgagttcgcaacccagtgacctgcatagcggcctacgcgcggttaccgagtgcaccggctcagcggtggtcgttcatgtgggcggcgacatcgacgccagtaacgaggtcgcttggcagcgtctggtgagcaagagcgccgctatcgccatcgcgccgggtccgttcgtcatcgacattcgggacctcgacttcatgggatcatgtgcatacgctgtgttggcccaggagtcggtgcggtgtcgccggcgcggggtgaatatgcggttggtgagtaaccagccgatcgtggcccgcaccattgccgcgtgcggactgcggcgactaattccgctgtatgcaacggtcgagaccgcactggcgccgcctcccagcgc

SEQ ID NO: 930 - DNA, 401 bp, Mycobacterium tuberculosis H37Rv
tatcgccatcgcgccgggtccgttcgtcatcgacattcgggacctcgacttcatgggatcatgtgcatacgctgtgttggcccaggagtcggtgcggtgtcgccggcgcggggtgaatatgcggttggtgagtaaccagccgatcgtggcccgcaccattgccgcgtgcggactgcggcgactaattccgctgtatgcaacggtcgagaccgcactggcgccgcctcccagcgcgcattgaccgacccattaaccgaccggtgccacccaacccgccatggtgtcgggttaaccgccgccgacaagattgaccacctcccgcgcacaaccccatgacagggtcacgccgtcacctccgtggccatagttgtggatgcacagcgctcgcccgatcggttcag

SEQ ID NO: 931 - DNA, 401 bp, Mycobacterium tuberculosis H37Rv
tgacagggtcacgccgtcacctccgtggccatagttgtggatgcacagcgctcgcccgatcggttcagcttccacccgcacggacggccgatcaggacgcagcccggtaatcgtctcaatcactgccgcctcggcaagccgtggttgtatgcggcgacaccgttgcaggatccgctcggttatctccggctctggggtggggtcccacctgccagggatactgatgccgccgcagactacacgctgcgggtgggcaaagtagcagatccattccgagccgccggtgcgctcgataaacagttgctctagacctggattggtgaggacgacgtgctggccgaaccgcggccagaccgtggcgtcgccggccagttcccgagcgcccagaccagcacagttga

SEQ ID NO: 932 - DNA, 401 bp, Mycobacterium tuberculosis H37Rv
agttgaatgactcctggatctcttccagggtgcgaatgaccttgcgcagatccccgtcggggtcgttgacctcccacccgacttgtggctgcaggcggatgcgaccaccgttggcgccgccgcgcttgtcgctaccacggaacgacgacgccgccgcccatgcggtcgaaactagctgtgagacagtcaatcccgatgcccggatctggctcttaaggctggcaatctcggcttcgccgacgaggtcgtggctgaccgcagggaccggatcctgccacagcagggtctgcttggggaccagcggcccaaggtatctcgcaacgggacccatgtctcggtggatcagcttgtaccaggccttggcgaactcgtcggccaattcctcggggtgttccagccag

SEQ ID NO: 933 - DNA, 401 bp, Mycobacterium tuberculosis H37Rv
tgaccgccgacgatcagcgccgctgtttcgacgtcgttcatggccatgcgccgaaacgtctcgcgaatgtcgaccgccgcggccatggggtccgggttgccgttcggcccctccgggttcacgtagatcagccccatctgcaccgcggccagcgggttctccagatcccgcttaccgctgtaacgctcatcgccgagccaggtggcttccttgccccaatagacctcatcgggctcccactggtcgacccggccgaagccgaacccgaacgtcttgaagcccatcgattccagcgcgcagttgccggcgaaaacaatcaggtccgcccatgagagcttcttgccgtacttcttcttgaccggccacagcagccggcgcgccttgtccaagctggcgttgtc

SEQ ID NO: 934 - DNA, 401 bp, Mycobacterium tuberculosis H37Rv
ccgtagtcggcgggccaccacggctgcgaggtggtcatcacttcctcgatgtcccgcgtcagggcgtcaacgtcgatggtcgcgacctccgcggcatagtcgaacgccgcacccatcgggtcagcgacggccgggttttggtgcagtaccttcagattgagccggttgggccaccagtcctggtttccgccgccctcgacggggtatttcatatgacccacgacgggacagccgttgctagcggctccggtggtggtttctgtaatgggtgggtgttgctcgggcacagcattccttccaggagttggtgttatcgggctgtgatcacggatgtgatcgcgaagtgtcggatatcgaacaatcaggacatagaccccagtagatgacctccgcctcgtcca

SEQ ID NO: 935 - DNA, 401 bp, Mycobacterium tuberculosis H37Rv
tcgccccggggccgctggatcgtgggatggcgggtggatcagccttcgtatgttccgatgagccgggcctgcatggtggcggcctgcgcgatcacccgcgccgcttgtgtcccagccagtcccgcgagtggaggcacggcaggaaggtggtagagggtaaaccggtagtggtgtgtcccggtgcccgccggcgggcaggggccggtgtatgcgggctgaccgctggagttcggcaggctgattccgccaccgggagtctcaccatcggcggtgctgccagcaccaggggcgatcccgatcacgatccaatggacgtaaggttcgcgaggtgcgtccggatcatcgacaacgagtgcgccgccaaacggcgccgaccaggtcaacggaggcgcgatattggc

SEQ ID NO: 936 - DNA, 401 bp, Mycobacterium tuberculosis H37Rv
ccgatgagccgggcctgcatggtggcggcctgcgcgatcacccgcgccgcttgtgtcccagccagtcccgcgagtggaggcacggcaggaaggtggtagagggtaaaccggtagtggtgtgtcccggtgcccgccggcgggcaggggccggtgtatgcgggctgaccgctggagttcggcaggctgattccgccaccgggagtctcaccatcggcggtgctgccagcaccaggggcgatcccgatcacgatccaatggacgtaaggttcgcgaggtgcgtccggatcatcgacaacgagtgcgccgccaaacggcgccgaccaggtcaacggaggcgcgatattggctcctttgcaggtgtactgttccgggatcggcgcaccgtcggcgaatgccggact

SEQ ID NO: 937 - DNA, 401 bp, Mycobacterium tuberculosis H37Rv
cgcccccgcagccacccagcgccactacgagcgccagccccgcggtggctaatggggttcggtgaagtgtgctcgtcattggagattccatagcacattgttactaactgggattcgagagtacagctgttttgcggccgcgcttaccagacagccgggccccgggccacccatcgcctcacggtaccagcaccaccttgtcgacgttctcccgtgcggccagaatccgatgtgcttcaggagcttcggcgaacggcacgattgcatgaacgatcggcaggatcgttccgtcgttgagcgccttggtcagcggcgcgatccagggttcaagggtgcggcgatcgtcccacaaccgcagcatgttaagaccgatcacggttttcgactcctcgagttgtttc

SEQ ID NO: 938 - DNA, 401 bp, Mycobacterium tuberculosis H37Rv
cctgtcgaagatccagcgcaccggcgttcacctgcgtcggcccgcggtcgcgactaccatcgccgcccccgtttacggcccggcacccggtgagaagaagcccaggagcatttggccgatgttgttgacgcccgagttaaacgcagcggtgaggtgaccaacggtgctcgtgttgttgaagcccgagacggtgttgcctaggttcgccacgcccgacgccagctgcccgacgttgtagattcccgagactccgccttgcagcgcgttcggcacctggttccagaggcccgaaatgccgggcccgacgttgccgaagccggatgcgcttccatcgccactgttgaagaagcccgaagacggggtggtggtggagtttccgaagcccggggcgctcgtgatgt

SEQ ID NO: 939 - DNA, 401 bp, Mycobacterium tuberculosis H37Rv
cggcaaacggcagggtgccggtgttggcgaagcccgatatgccgctgccaaggttggagaagccggagataagaccaccgtagttctggtagcccgagccggctagcagcccaacaggacttgtgttgaaccaacccgacagtcccgagccgctgttgccgaagcccgagttcccaccgattccggcgttgaaaaagcccaacgagggcgttgcgctcgagttgaagtatcccggccccgctgggattgcgaatccgcccatggtggtgctcggcaggtggatgctggcgatggtgagtgcgggtgtggtgaaggccgccaagcccaccggctggatggtgaactctggcgtggtgatctccgggatattgacctgggggagggtgaaaccgctaagtccg

SEQ ID NO: 940 - DNA, 401 bp, Mycobacterium tuberculosis H37Rv
ctggtagcccgagccggctagcagcccaacaggacttgtgttgaaccaacccgacagtcccgagccgctgttgccgaagcccgagttcccaccgattccggcgttgaaaaagcccaacgagggcgttgcgctcgagttgaagtatcccggccccgctgggattgcgaatccgcccatggtggtgctcggcaggtggatgctggcgatggtgagtgcgggtgtggtgaaggccgccaagcccaccggctggatggtgaactctggcgtggtgatctccgggatattgacctgggggagggtgaaaccgctaagtccgatcgggtcgatggcgaacggtggagtcgttatctcgggcgtcatgatctgaggaagcgtgaaaccacccagcgctatcggatcga

SEQ ID NO: 941 - DNA, 401 bp, Mycobacterium tuberculosis H37Rv
taagtccgatcgggtcgatggcgaacggtggagtcgttatctcgggcgtcatgatctgaggaagcgtgaaaccacccagcgctatcggatcgatcgtgaacgccggggtggtaatcgccgggatgctgagctgcggcagcgtaaacccacccagcgtgatcgggtcgatggtcaactccggggtcgtgaactgttgagtagtgatatccggcaggctcaatgcaccgacaccaatcggactgatcgtcaacgccggagtggtgaattcttgggtgctgatctctggcagggtgaacccgtcgaccgagatccccccgagggaccacggttggatgacgacgttggggagggtgaagggggtgacgttgattgcgccgatcgagaagccgacgccgttgatt

SEQ ID NO: 942 - DNA, 401 bp, Mycobacterium tuberculosis H37Rv
ggcaaccacaacacgcttggcttggtcgacgcgccattgctggccgccgagctctgggagcgggggagaatcgtccggtcccttggcgaccacgcccatttcaagattccggggtggcgcgacgcgctgacacgaacaggggtcgtcgaaggcaccagagagatcacctcggagttgatgcgacgcggcgagctcgtcatggtctttcccggcggcgcccgtgaggtcaacaagcgcaagaacgagcgctacaagctggtgtggaaaaatcggctggggttcgcgcgcttggcaattcagcacggctatccgattgtgccgttcgcttcggtgggtgctgaacacggcatcgacatcgtgctcgacaacgaatccccactgctggcaccggtccagttcct

SEQ ID NO: 943 - DNA, 401 bp, Mycobacterium tuberculosis H37Rv
ccgcgatcctgctgctcgtcgaagccggaaagctaacactcgacgacccgatatcccaatacgtacccgagctacccgactgggcccaaaccgtcaccgtcgagcagctcatgcatcaaaccagcggcatccctgattacgtcgcattgctggcagccagggggtatcaggtcagcgaccgcaccatcgaggccgaagcccggcaggcgttagcggccgcccccgagctgcaattcaagcctggcaccaggttcgattactccaactccaactacttgctgctcggcgagattgtccaccgcgcatcgggacaaccgctgcctgagttcctcagcgccgagatctttcaaccgcttggtctggccatggtggtggatccggtcgggaaggttcccaacaaa

SEQ ID NO: 944 - DNA, 401 bp, Mycobacterium tuberculosis H37Rv
accgcggttggccgccggtacccaggctgcaatcattcacggtatggcgcaaccaccgtcactcctcacaactgacaatggcctacccttcggcgtgcaaggtgcctgcgactcccgtttcaccggagtcatccgtgcctttgctgggctgtaccccggccgcaagttcgggggtggggcactgtcggtttatatcgacggtcgccaggtcgtcgatgtctggacggggtggtccgatcggcagggcaaagtaccctggacggccgataccggggcaatggtgttctccgcgaccaaagggttggccgcaacggtgattcaccgtttggtcgatcgcggccttttgtcctacgacgcgccggtcgcggagtactggcccgagttcggagctaacggcaagt

SEQ ID NO: 945 - DNA, 401 bp, Mycobacterium tuberculosis H37Rv
gtttggtcgatcgcggccttttgtcctacgacgcgccggtcgcggagtactggcccgagttcggagctaacggcaagtctgaggtcaccgtcagcgatgtgttgcgacatcggtccggactggcgcacctcaagggggtggacaaggacgaggtcatggaccacctcctgatggagcagaagttggcggctgcgccgctagaccgccagcacgggaagttggcttaccatgcggtgacttacggatggctgctgtccggcttggctcgtgcagtgaccggcaaaggcatgcgtgaactgttccgcgaagaactcgctcgcccgctgaacaccgatggtattcatctcggccggccaccggccgactcgcctaccaaggcggcacagacacttctgccccaa

SEQ ID NO: 946 - DNA, 401 bp, Mycobacterium tuberculosis H37Rv
ctcgggcgagcgcggcgtcgcgggtggaagtcgggttgatgacgtcggccgggtccatgactgctcctagtgtgcctgcctcgacgcctagcggacggctgtgtcgggggtggtttggttcggactctagtggagcccggttgcgcactcgggtccgaccaatgcggggccgcgcctcatacgcacgataagcgtgggtgtatagactgcggttatgaatgacggctcccggcaggaactcagggttcgtagcggcctactacaaatcgaggactgcctggatgctgacggcggcatcgcattgccggcaggcaccacgctgatctcgctcatcgagcgcaacatcaagtatgtcggcgacctcgtggcgtatcgctacctggaccacgcccgttcggccg

SEQ ID NO: 947 - DNA, 401 bp, Mycobacterium tuberculosis H37Rv
gcccagactcaacgcccgcctcgccaccaagcccgccaccgcggtggtgtagccatggcggttcgtcaggtcaccgtcggctattcggacggcacgcacaagacgatgccggtgcggtgcgaccagacggtcctggatgccgccgaggaacacggcgtggccatcgtcaacgaatgccaaagcgggatatgtggcacctgcgtggccacctgcaccgccggccgctaccagatgggacgcaccgagggactgtccgatgtcgagcgggcggcgcgaaagatcctcacctgccagacgtttgttacctccgattgccggatcgagctgcagtatccggtcgacgacaacgccgccctgctggtcaccggtgacggtgtggtgaccgcggtcgagttggtgtc

SEQ ID NO: 948 - DNA, 401 bp, Mycobacterium tuberculosis H37Rv
tgatggactggctgcaccccgacggcaacttttccgaccaggagcgtgcccgcaagcgcggcatcacgatgggtaagcaggaatttgacgggatgtcacgtatcagcggtctgctgaccccggagttgcgggccaccatcgaggcggtgttggccaaactggccgcaccgggggcgtgcaaccccgatgaccagaccccggtcgtggatgacacaccggatgcggacgcggtgcgccgcgacacccgcagccaagcccaacgacaccatgacggtttactggccgggctgcgcgggttgttggcctccggtgagctagggcagcatcgggggttgccggtgaccgtcgtggtgagcaccacgcttaaagagctggaagccgccaccggcaagggggtaacc

SEQ ID NO: 949 - DNA, 401 bp, Mycobacterium tuberculosis H37Rv
tatctggcattgtttgacggcgctaagccgttggcgttgtatcacaccaagcggttagcttccccggcgcagcgaatcatgttgtacgccaaggatcgtggctgctccaggccgggttgcgacgccccggcctaccacagtgaggtccaccacgtaacgccgtggacaaccacccaccgtaccgacatcaacgacctcacgctggcctgcggccccgacaatcgccttgtcgaaaaaggctggaaaacccgcaagaacgccaaaggcgacactgaatggctaccgccggcccacttggaccatggccaaccacgcatcaatcgataccaccaccccgagaaaatcctgtgcgaacccgacgacgacgaaccacattgacacccaatgaccgtggcattgcc

SEQ ID NO: 950 - DNA, 401 bp, Mycobacterium tuberculosis H37Rv
gacgacgagtatcccaatatcgtgctcacccatagcgtttcagcgggcaaccaacgattgccggccagcgaatctcggtggcggtagccagcatgaaggacgcagatgacctcgccgactacgggctgagcatagagcaggtgcgtgcagccgtcgactcgcatgtggacgtggaccattctgtctcagcgctgtgaccgcacggtagagttcgccatcgtggctgacgatgacgtcaccggtcaggatggctccggcgacggcaccgatccgcgcaccatgctgggccggtttgccaaccagcacaacgaatgggtgcgcctgagcgtgcgccacgtgctcgatgcgggcgaagcattggatgccggacagattgattaggtctaccgccactttcggca

SEQ ID NO: 951 - DNA, 401 bp, Mycobacterium tuberculosis H37Rv
gcgccatacaacggtttgcgatcccagttccatatccgcagttccgctttctcgaactatccgttgctgtacaccatctatgtcgaaagttgcctgaccactctcatgggccgatcgcacggcgtactggaaaatgcgaagcccatcccggtctgcggccgccagaaccacgtcaccgaagtagttatccggcttgataccgaaaacggtcattctggtccaatcacttgtgagtcggaaggtccccgatgggaatattctgccacctggcggtcggcgaatcgtgggggttgtaatcccaatgcggatagcggtaattgtctcccggaaaatatcgccactcgccgccgttctcgtcccagaggctttcgccgccgcgagcctgttggataggacgactg

SEQ ID NO: 952 - DNA, 401 bp, Mycobacterium tuberculosis H37Rv
gctttcgccgccgcgagcctgttggataggacgactgggcggtccaaccgttaggttgctctcggcgggcgggctgacaccgggcggaggtaagccttcgttcggttgtggtccagcggggtcgggagcaggagggggttcgccttcgaccggcacgcccaattcgcctaaccgggctctgattgcggcttgtctttcaaagagagaacccttgtccgcgatgcacgcgtcgtaggctgcctgctcgttgggcagaacgaaggtgcgtccgcatcgggcgttgtaccgagcgatgtcagcgttgacggcgtcccaggctgcgcgtgcctgtacggctgtcatgtctttcgggtcgcccggcatcggtgagggtggatcttgtttccagctgcggtcgaccg

SEQ ID NO: 953 - DNA, 401 bp, Mycobacterium tuberculosis H37Rv
caccgacccgacccagagtgagcacctacggcgctggttcgacgacaaggtgctgcgcatattcgtgttcgcccgccggggcacaaacctcatcatgcagcccctagctgggcatataggttacagcctatattctggtataagctggttttagacgaaaaggaccccacctcggggtctgatggccaggggcagggtcgtgtgcattggggatgcaggttgcgactgtacacccggcgtgttccgcgcgacagcgggtgggatgccggtgctggtggtcatcgagtctgggacaggaggtgatcagatggctcgtaaagctacgtccccgggtaagccggctccgacgtcgggacagtatcgcccggttggcggtggcaacgaggtgaccgttccgaagg

SEQ ID NO: 954 - DNA, 401 bp, Mycobacterium tuberculosis H37Rv
cattcccaacccgcgaatcctggaacttggtgcgggccatggcaagctctcagcgaaaatcctcgagctacacccgacagcgacggtgacgatcagcgatctagatcccacctcggtggccaacatcgccgcgggagagctgggaacacatccgcgagcacgcacccaagtgatcgacgccaccgcaatcgacggccacgaccacagctatgacctggcggtcttcgcgctggcatttcaccacctgccgcctacggtcgcctgcaaagcgatcgccgaggccacccgggtggggaagcgctttctgatcatcgacctcaaacggcagaaaccgctgtcgttcacgctctcttcggtgctgctactgccgctccacctactgctgctgccatggtcgtcga

SEQ ID NO: 955 - DNA, 401 bp, Mycobacterium tuberculosis H37Rv
aggagaccatcggcacgtcgtattggttcttgcgtgacaagcgtgtcggcagaaccccgctgtccgctaacgcggtccaaagccgcggtgcaccgaacgaggccgcgacattgatgccgaacatcgatatcagggctccgacgacgatgatcgttcggaaggtagcgtttccgatggccgcggccagtttcacggtgtcgtccgacgcggcgatcttgttcgatccgagcagcatcgctaccgttagggtgagcaagtagatcgcgccaaccgagaagatcgcgatcggtatagctctcggcaggttccggtccggcgcgtccatttcttcggcggcgttcgcgatcgattcgaaaccggtgaatgcgtacaacgcgacaatcgtggccagcgccatactc

SEQ ID NO: 956 - DNA, 401 bp, Mycobacterium tuberculosis H37Rv
cggtgtcgagcagggtcaagccggtgaacacccggatcgtcgtctgctgctcggtggaactcaacgtttgccaagatgccaggtcgttggagagcggaatcttttccggcaaccaaaagttaccggtcaaacgttcccagacctgcaaatctttagcatcgagcaaccggttccaattgattgcgtgcacccgctcaacgagcttgccggtcatcgagggccgtcctgccttgccatggtcatgccgctgttggccggtgcgtacgctcctgtgggcgtcaagtccggcagtcggtccttgggcatttcggccgtcctccttgtcattgacggtctttcatggcgtgcaccagcactgtagcttagtgatttcggctacccatattttattcttcgtgtcg

SEQ ID NO: 957 - DNA, 401 bp, Mycobacterium tuberculosis H37Rv
cgtcgggggtcggcggcggggccggcggttccgcggggttgatcggcaatggcggcgccgggggagccggcggacccaacgcccccgggggagccggcggcaacggtggctggctgctcggcaacggcgggatcggcgggcccgggggcgcgtcgagcatccccggcatgagtggtggagccggcggaaccggcggtgccgcaggacttttgggctggggagcgaacggcggagccggcggcctcggtgatggagtcggtgtcgatcgtggcacgggcggcgccggaggccgcggcggcctgttgtatggcggatacggcgtcagtgggccaggcggcgacggcagaaccgtcccgctggagataattcatgtcacagagccgacggtacatgccaacgtc

SEQ ID NO: 958 - DNA, 401 bp, Mycobacterium tuberculosis H37Rv
accgcaatggtgatccgcgtgcgtttcagcgacgcgttgccacccatttcagcgagcgcctcggactcgagcaacgctgtttgcgcggccaaccgcaacagcgggatacctgcggtcgtcgcccgacatggcttttccctgaccaccagcacctggccgacctgctgctccaacgacttgatgcgctgactgacagccgacggggtgacatgtaggcgctccgcggccgcatcgaagctgcccagttcgaccacggcagccaatgcggccagctgtggaccgtcaagctgcggatccaccatctcaggtgtagaccatctgcggagcgtcgcactgcacattaataatgctaatgtaaatgaagaattattagctatactgacccatacaaactgcctagt

SEQ ID NO: 959 - DNA, 401 bp, Mycobacterium tuberculosis H37Rv
gaatagcaccgttgcacgatctggcacgcactacgttctcagcccagcgaattggaatcgcatcattgcccccggtggttcagccacgggcggcctaagaggcgggctgaccggttcttactcgccgccgtcgagttgtctgctcaacgggcaatatccttgcacctagacgcgactgcgcactgaggctcgccgactgcaacaatgcggctactgccaggtgggtctagtgggtcgtcacggccaacgtcatctcggagttgatgcggacggcgccagagccctggggctggtgatgaccagaaggttgcctgaaccgagaaattggattgatcgcagtgccggtggcgggctacggtcgggcgcgtgggcatctacgcagtgacggtacgtcgtgtccg

SEQ ID NO: 960 - DNA, 401 bp, Mycobacterium tuberculosis H37Rv
gtgctggccaagggtgctgtggagcgcatgctcgacctgtgcggcaccgagatgggcgccgacggcgcattgcggccgctggaccgcgccaccgtgttgcgtgccaccgaaatgttgacttcccgggggttgcgggtgctggcaaccgggatgggtgccggcgccggcactcccgacgacttcgacgaaaacgtgataccaggttcgctggcgctgaccggcctgcaagcgatgagcgatccaccacgagcggccgcggcatcggcggtggcggcctgccacagtgccggcattgcggtaaaaatgattaccggtgaccacgcgggcaccgccacggcgatcgcaaccgaggtggggttgctcgacaacactgaaccggcggcaggctcggtcctgacggg

SEQ ID NO: 961 - DNA, 401 bp, Mycobacterium tuberculosis H37Rv
caccgacacgctgctgccgagaatacgggcgcaaccgccatgatgccccgtccgtgagtacggtgtgcgtgcggtcgatccggccagagttaccaggtcggaactagccagttacgttgtactcgtgcggttctcgtagtcaaccaagcgtgcctgcagttcggcgtacggtacggaccgtggcagctgctctccgtcgctcacggcccgagccgcgtgggccgctgcatacaaccccgcgctgtagggcactgaaccggttgacacccgggccaccccgagctcaccaaggtcggcgatcgtcaagccgggcacgggcaacgtgttaaccgggcacggaatgttgcgagtgagctcagcaagttcgtcgggatcgttggccagtgggacaaagacgccgt

SEQ ID NO: 962 - DNA, 401 bp, Mycobacterium tuberculosis H37Rv
cgcgccaaccaccagttcggcacgaaagggcaccttgaacctagggtgcacggcggccagccagcgcggtaggtgccggtcgcgtgccatcgccaaggtggtgcgggagaccccgagaatcaaggccagtagcgagcccaatgcggccaccgcggcccctatctgcacgacgggaatcagccagttcacccccgcgacccgcatggcctccgacaacggggcggcggcccgcgcgagccgctgcggacccaacacagcgatcacggccacggcgaccagggcatacaccgccagggtgatgcccagcgccagcgggatggcgcgtgggatcgtgcgggccgggtcgcggacctcctcccccagcgtggcgatgcgggcatagccggcgaacgcgaaaaaca

SEQ ID NO: 963 - DNA, 401 bp, Mycobacterium tuberculosis H37Rv
accgccggcgaccagctagcgaagctgctcgacgccgccaccgcaacaaccgaacaacgctaaggatcggccgtgcaccataaccgcgatgtcgacttggcgcttgtcgagcgacccagctcgggatacgtctacacaacgggttggcgactggccacaacggacatcgacgagcaccaacaactgcgcctcgacggtgtggcgcgctatatccaagaggtcggtgccgagcatctcgccgatgcccaattggcagaggtccatccccattggattgtcctgcgcacggtcatcgatgtcatcaacccgattgagctacccagcgacatcacctttcaccggtggtgcgcagcgctttccaccaggtggtgcagcatgcgtgtgcagctgcaaggatccgc

SEQ ID NO: 964 - DNA, 401 bp, Mycobacterium tuberculosis H37Rv
tatccaagaggtcggtgccgagcatctcgccgatgcccaattggcagaggtccatccccattggattgtcctgcgcacggtcatcgatgtcatcaacccgattgagctacccagcgacatcacctttcaccggtggtgcgcagcgctttccaccaggtggtgcagcatgcgtgtgcagctgcaaggatccgccggcggccgcatcgaaaccgaagggttctggatctgcgtgaacaaagacaccctgacgccgtcccgtctcaccgatgactgcatcgcacgtttcggcagcaccaccgaaaaccaccggctcaagtggcgcccatggctcaccgggccgaacatcgatggtaccgagacaccatttcccttgcgtcgcacggatattgacccgttcgagc

SEQ ID NO: 965 - DNA, 401 bp, Mycobacterium tuberculosis H37Rv
cgcccaccatcgaccggcgctaccacgacgctgtcatcgtcggcctcgacaacgtggtcgacaaggccacgcgagtgcacgccgcggcatggacgaagttcttggatgactacctcacccgacgaccccagcggaccggcgaagaccattgccccctcacccacgacgactaccgccgcttcttggccggcaaacccgacggtgtagccgacttcttggccgcccgcggaatcaggctgccgccgggctccccgactgatctcaccgacgacaccgtgtacgggctgcaaaacctcgagcgccagacattcctgcaactgttgaacaccggtgtccccgagggcaagtcgattgcctcgttcgcacgtcggctgcaggttgccggtgtccgcgtggccgcc

SEQ ID NO: 966 - DNA, 401 bp, Mycobacterium tuberculosis H37Rv
gaagcggcaacgctcgtcgacggcgcagcagaagcgttgcgagcgctggcggcccagtgtccggtggcggtgataagcggacgcgacctggccgacgttcgcaaccgggtcaaagtcgacgggctgtggctggccggcagccacggcttcgaattagtggcgccagacggcagccatcaccaaaacgccgccgccactgcagctatcgacggattggccgaggcggcagcgcaattggccgacgcactccgcgaaatcgccggagcagtagtggaacacaaacgcttcgcagtcgcagtgcactatcgcaacgttgccgacgacagcgtcgacaacctgattgcggcggtgcgccgactcggacacgcagcagggctgcgtgtcaccaccggccgcaaagt

SEQ ID NO: 967 - DNA, 401 bp, Mycobacterium tuberculosis H37Rv
cgtggattactatcttgcccgcacctcggatggatctaccctgagcgctgtcgtgcatgcgtgggttctcgcccgcgccaaccggagcaatgccatggagtacttccgtcaggtcctgcgctccgatatcgccgacgtccagggcggcacaacccaggaaggaattcacctggcggccatggctggcagcatcgacctgctgcagcgttgctattccggattggaactgcgcgacgaccggctggtgttgagcccgcaatggccggaagcacttggaccacttgagtttccgtttgtgtaccgccgccaccagctgagcctgcgaatcagtggccgaagcgccacattgaccgcagaaagtggagacgccgagccaattgaggtcgaatgccgtggccacg

SEQ ID NO: 968 - DNA, 401 bp, Mycobacterium tuberculosis H37Rv
tcatacacataaatgtgtatagtggtgttgtgtcacggaccaacatcgagatcgacgacgaactcgtggccgccgcacagcggatgtaccgactcgattccaagcgaagtgccgtcgacctcgcgctgcgccggctcgtgggtgaaccgttgggccgcgatgaggctttggcgctgcagggcagcggtttcgacttcagcaacgatgagatcgaatcgttctcggatacggaccgcaagctcgccgacgagtcgtagatgatcgtcgacacctcggtctggatcgcatatctctccacgtcagagtcgttggccagtcgctggctagccgatcgcattgccgctgactcgacggtgatcgtgcccgaggtggtgatgatggagctgctgatcggtaagacc

SEQ ID NO: 969 - DNA, 401 bp, Mycobacterium tuberculosis H37Rv
cgctcatcaacccggttcgtggtcaagacttttcaccggggcgacgtttcctggggctagtaaggcggttgccgatcttcgtgaagcggcggtgtccgagacccacgacaccaaggacgtgttagccgctttggccgcgcgcaagtccccggtgcgacctttctgatgcgatcgacgatgtaggtgggatctcgtgctctccgcaccagtcgttgggatcctgggcgattccggacgctttgtcggtggtgacgcggtcgatgatccagcctagcgccgaacccgagccgagcaggcaacgcccggccccaagtggtgcgcaccgccgccgtggatcttgatgggagcacgcgaagctcactggtgcaccatccttgtgtcggtgaccttggatggattgc

SEQ ID NO: 970 - DNA, 401 bp, Mycobacterium tuberculosis H37Rv
actggctgtcggtcaagcgcctggccggctggctggccgccgctggctactgcggccgtgctccacgaccggctcaccggtgccccgcgcggcgccaccggtgacgagggtgccgccaacgcccacatcacccgggccatggtcgccgcgctcaccagcgtcgcgacccagatcaagacgctcgacgcgcagatcgccgaacagctctccttgcacgccgacgcgcatatcttcacctccctgccccgctccggcaccgtccgcgccgcccggctgctcgccgagatcggggactgccgagcccgtttccccacgcccgaatcgttggcctgcctggctggcgtcgccccctccacccgtcagtccggcaaagtcaaacacgtcggattccgttgggccgc

SEQ ID NO: 971 - DNA, 401 bp, Mycobacterium tuberculosis H37Rv
agccaacctctgggccgccgaccgctacaaccgcgccatcgcccgaggacacgaccacccccacgccgtgcgcatcctggcccgcgcctggctctacgccatctggcactgctggcaagacggcgccgcctaccaccctgccaaccatcgcgccctccaggcactgctcaaccaagatcaagaccgggcggcttgacacagggctactcatcggcctagcgggtgggcgccaccagcgggtagcacgaacgaaatccttgatgccccaaaccgtttaagcgttactgcagggtacaggtaccgagcgggacccgctgccgggcctagttgcttatcggtggtggttgcggctggaagggttcataccaccaccagtcggcgcgctcgccggtgggcccagg

SEQ ID NO: 972 - DNA, 401 bp, Mycobacterium tuberculosis H37Rv
ccaggggcaaccgatcatcacggctcttccccacccgaccggcagtcacgctcggctcccattcgtcggaatcgccgaggcgtatgtgttgaacgccttccgccgagcgggcgtccctatgcagcggatccggccatccctcgactggctaatcaagaatgtcgggccacacgcgcttgcgtcccaggatttgtgcacggacggtgccgaggtgctctggcggttcgctgaacggtccggggagggcagtcctgatgatctggtggtcagggggctgattgtcccgcgatccgggcagtacgtcttcaaggagatcgtcgagcactacctgcaacaaatcagctttgccgacgacaacctggcttcgatgattaggttgccgcagtacggcgatgccaacg

SEQ ID NO: 973 - DNA, 401 bp, Mycobacterium tuberculosis H37Rv
gaccgaaagcggttgaccccaaggagagctggaagtcgaggccaccaccttcgccgcggagttgctcatgcccgagagcgagactcgtcccgaaatacgccggctcgatttcggcaagttgctcgaactgaagcgggaatgggcgtcgacccgctcgaccagccccagccgggtgaccagccccagccgggtgaccagccgatgcaccgcggcgatcccaccgaagccggtggcatcgatgttggcgccgacctcgtagcgcaccgcgcccgaacccagcatcggcctgggctgcgccgcccagcgtccagcccgcgcgtgccgcgccgccaccctgcgccctcggcgtgtgatgtttcgccgactctgttcatgggttatcttcttcaccacaaaggcct

SEQ ID NO: 974 - DNA, 401 bp, Mycobacterium tuberculosis H37Rv
ggtcgcaaacccagccagggtaaggcctttggcctctcctacccggccgacacgcttactgaaggcctagtctaggcaggccattcaatctgcggaatcgaaaaattcggttccagcctgctcgtttcctttccgacagcgatctgacgttgcgtaacgtcatttgtacggactcttttagcggcattgatttcagatgccaacgccgtctgtgctgtagcgccgattggccgaaactgtaaatttgtatgattatttaaatctttgacgaacacgcgccacaaacgtactatctctttggcaaagtccaccggcatctcattcaacggttttgtttgcgcgtggtcgtcatatgttggtaactgtgtaaccggccgcctatcttgcgcgtgcatcatatg

SEQ ID NO: 975 - DNA, 401 bp, Mycobacterium tuberculosis H37Rv
gagcagcccgcgctccaccgcctcgccgaacgacagccggtgaaactccggcccgaacgtcagctcgtcgtccatcgacaccaactcggcggagtgctggtcggccctgtccttgatgctctcggtgaaaatccttggcgtggcggtcatatacagccgccgggccgccttcagatactgaccgtcgtgcacccgcacgaagttcgactcatcgtcccccgccagcgtcacgccggtggtgcggtgggcctcgtcgcacatcaccaagtcgaactcgtcgacccccagccgttgggccttggccaccgtgggcagcgactggtaggtgcaaaacaccacggtcaggccctgggcgcgcctgcggtgcgccatttcgtgcagcaatacccgcgcgtcggtgg

SEQ ID NO: 976 - DNA, 401 bp, Mycobacterium tuberculosis H37Rv
ccgccgggccgccttcagatactgaccgtcgtgcacccgcacgaagttcgactcatcgtcccccgccagcgtcacgccggtggtgcggtgggcctcgtcgcacatcaccaagtcgaactcgtcgacccccagccgttgggccttggccaccgtgggcagcgactggtaggtgcaaaacaccacggtcaggccctgggcgcgcctgcggtgcgccatttcgtgcagcaatacccgcgcgtcggtggtgaccgggatcggcacatcgtggacgtggtagtcctcggccgagcgcgacaccttggtgtccgagcacaccgcgaacgcccgcacatccagctcactctgtgcggtccactcccgcagcgtctggctcaacagcgaaatcgagggcaccagcaaca

SEQ ID NO: 977 - DNA, 401 bp, Mycobacterium tuberculosis H37Rv
cgtacggatccctgccgcagtggattccagggtgtcgtcgacgctgtcggcggcgtcgtgggagtgcggcgcgaagatctccttgatcatcgccggcacacctcgtgaatgagcgtggtcgtgggtcatcgggcgcaggccctttgtgacagcaggccagatcggccgcgttcgaccaccaagcaagctcttttatctgcattcatacgcagataatagcggatgctctcgccggttccagtactagctgggacggacgacgatcaccgggattctcaccgaatgggctaccgcggaactcaccgaacccaacagcatgccggaaaaccccccgcgcccatggctgccgaccaccaccagctgagcttgctcagaatgctcgagcagccaccgagcgggct

SEQ ID NO: 978 - DNA, 401 bp, Mycobacterium tuberculosis H37Rv
cccgtagcgggcatccaccaactcggcggcggtatgcacaatggcgcgcagggtggcgtcgagcttgagtcccgatgtgatcgccaagatggcgtcgatcagaccatccagccggtcgcggccttcgacgatctgttcaatccggtcttggacttccagcagcagctctcgcaaccgaagctgcgacagtgtctcgcgcaatggcgggctgccagggttaacgttcgccctgtcagggtgtgtcacatagctatgttgacaccggagctgcgctcaaccaactggtctggctacccagcggcacagtcacagatactgctgaccgacgaccagcagggtgcagccggcctcctgcaacacggcgttgcccggcgctcccacaagttgctccacatgctcct

SEQ ID NO: 979 - DNA, 401 bp, Mycobacterium tuberculosis H37Rv
cggcgagatgctttccgccgtattgcttgacgccaccatggctgggcttgccacctgcacgctgacccacatcaccgaactgcacgccagccgagacctggtcgcagcgctgattgggcagcccgcaactccgcaagccttggttcgcgtcggtctggccccggagatggaagagccgccaccggcaacgcctcggcgaccaatcgatgaagtgtttcacgttcgggctaaggatcaccggtagcgggcgccgccgggaccgcgtctaagcaccgcagctgaatcgggcggatgatgtgtcgatgagcggatccggcgatggcgacggtgtcgcgcggttgggcagacatcttccgcggctattcgtccccggccggctgagtgacgaagtcgatcagttc

SEQ ID NO: 980 - DNA, 401 bp, Mycobacterium tuberculosis H37Rv
tctgactaccctcacactgcagcaatgggaaacacccagcctgtgcgccgggtggagcgtcaaagaagttgtcgcacatatgatcagctacgaagatctcggcgttttcgggttgctcaagcgctttgccaaaggccggatcgtccgggccaatgaggtgggtgtcgacgaattcgctgggctcagcccacaggagttggccgactatgtcggccggcatctccaaccgcgtgggctgacagcgggtttcggcggaatgatcgccctcgtcgatggcatgatccaccaccaggatatccgccgcccgctcggtcagccccgcaccatccccgcgcagcgacttgaccgcgtgttgcggctgatgccgaagaaccccaggctgcgagctcggccacgcatca

SEQ ID NO: 981 - DNA, 401 bp, Mycobacterium tuberculosis H37Rv
ctgactaccctcacactgcagcaatgggaaacacccagcctgtgcgccgggtggagcgtcaaagaagttgtcgcacatatgatcagctacgaagatctcggcgttttcgggttgctcaagcgctttgccaaaggccggatcgtccgggccaatgaggtgggtgtcgacgaattcgctgggctcagcccacaggagttggccgactatgtcggccggcatctccaaccgcgtgggctgacagcgggtttcggcggaatgatcgccctcgtcgatggcatgatccaccaccaggatatccgccgcccgctcggtcagccccgcaccatccccgcgcagcgacttgaccgcgtgttgcggctgatgccgaagaaccccaggctgcgagctcggccacgcatcaa

SEQ ID NO: 982 - DNA, 401 bp, Mycobacterium tuberculosis H37Rv
cggcatccaggaattcggcgaagctccatggccgttcccagctaccgggcggcggtggcacgccggcgtcgtcgaatagctgtttgttgtagaacaagaagttgccggaccattgctccggaaaggcgtactggcctccgttgaacgtgaaagtctcatacagggccccgatgctgtccgatttcagctccgcggcgaaagcctggtcgcgcgccaatagcgtgttcaggtcaagcaacaccccccggtcggccagttcggcataggtcagttcccatgccatcagcacatccggacacttgccacccgcgcaaaacgttgcgagctgctgcatgacgccgggtccggacaacagggcccgtaccttgatatcgggatagcgccgctggaattcgttgacg

SEQ ID NO: 983 - DNA, 401 bp, Mycobacterium tuberculosis H37Rv
gcgttgccgcagccaattcagcagtggcgtgccgttctcgtcgactccttcgaagccgctgtacgctccggtgtaggcacccttgtagaacaccgcctcgattgccgacgtgtccagactgggatggaagtccgcgccgggagtaccgctgacgcaatgcggtggccacgacgaggaatagtccggtgtgccggagaagtggtcacccgggtcgatgtggaagtccttggttgccacgacgtgatggtagtccgccgcttcggccaggtagtcgctgatggcgcgggccagcgcggcgccaccggttaccgccagcgagccaccctcgcagaagtcgttctgcacgtcgacgatgatcaacgcccgcatacgtccaccatacgttcgggcgactgcccggg

SEQ ID NO: 984 - DNA, 401 bp, Mycobacterium tuberculosis H37Rv
cggtgcacaccgtcgcgcgtgaagccttcaacgatgccggtggccgtgcgggcgcgcacggtgcgctcgtgcatagacccgacggtagccgactccagggccacgcggcatgcgcagtgcaggaatgggggcggggcggctagcctgtcgggatgcggatcgccgcgctggtcgcagtgtcgttgctgattgcggggtgctcgcgcgaggtcggcggtgatgtagggcagtcgcagaccatcgccccgccggcgcccgccccgtcggcggcgccgtcaacaccaccggccgcaggagcgccgatcaccactatcgtgtcttggattgaggcgggtcacccggttgatcccgccgcctatcacgtcgccacccgcgacggcgtcaccacccagcttggcgac

SEQ ID NO: 985 - DNA, 401 bp, Mycobacterium tuberculosis H37Rv
acaacccacttcgtcgccggcgcggatcgccaactccacaaatcccgctcccgggaagatcgtcacgccggcaacggagtggtcggccaaccagccctgcacgctgggcgacagccgacccgtcaacaccaccccgcccgaggccggcagatcgatcaccgcgcccaagagcgcgtgctcactggccgccaaccccaagccggccgcgtccgccgcgacaccatcaccggacagccaaaaccgccgccgttggaaggcatacgtcggcaactcgacaaactgcgcctcgcctaccacagcgcgccaatccaggtccataccggtgacaaacccttgcgcgacggcgttggtcaacgtcgccggctcggggcgatccttgcgcagcgcagacatcgttgtca

SEQ ID NO: 986 - DNA, 401 bp, Mycobacterium tuberculosis H37Rv
taggaggccagccgattgggtgtcgggtagtcgaagatgagcgtgggtgaaagtgaaaggccggtggcggatttgagccggttacgcatttcgaccgcggtcaacgagtcaaaacccaggtcctggaacgccttgtcggggtcgatggcttctggcgtgatgttgcccagcacggtggcgatgtgcaaacgcaccaggcctagcaagacggcgtgctgttcggcttcgggcagcccgtgcaggcgatgcgcgagcgccgatttcgactttgcggcggccacggagtcgtcgacctgacggcgggtcggcgcgctggctaggtcggagaacatgggcggcaccgccaccgcatgggctcgcagtgcggtgaggtcaatgcgggcgggcgccaggaatggctc

SEQ ID NO: 987 - DNA, 401 bp, Mycobacterium tuberculosis H37Rv
ccccccaggtcggggtggcgaccggcggcgtgaacccgaagccggtcatcagcacggtgtcgcacaggaaggcgtgcaactcgcgcaggttgtcgacgccgccgtgggccaggtagatgtgggcctgcagcgcggtgccggccgcgaccgtggagcggtcggtcaactcggcatcggcggcctgctctccgctgaccagtacggccggtaccccgccggcgatcaccgtgtcgattccgctctgccaggcgcggtagccgccgagaatccggatcaccacgatcgacgcttcggccagcaggtcggtcagttccaggtcagacagccgcgagggattcgcccaccggtagttcttgccgctggaccgggcgctaatcaggtcggtgtcggacgtcgacaac

SEQ ID NO: 988 - DNA, 401 bp, Mycobacterium tuberculosis H37Rv
cgcgcggcgatatcggccaacgtgccgcgtagcgtccgctgttgcggccaactcgcgaaagccaccaccgcaaccggcgtttcgggtcggtaaccaccgtctagcagtcgcggaacgatggcgtcgatctgggctgcggccaggtgcaagaccagagtggcgcgggatcgggcgagcgcggccaggtcctcaccgggcggtatgggtgtggacagcgtcgccacccgggtgagcgtcaccgtctgcgccacgcccggcacggtgagttcgcgctttagcgccgccgcggctgcggcaaaagccggtacgcccggcacgatttcgtagccgatgcccagcgcgtcgagttcgcggcactgttcggccagcgcgctgtacagcgacgggtcgccggaatgcag

SEQ ID NO: 989 - DNA, 401 bp, Mycobacterium tuberculosis H37Rv
ctcgcgaaagccaccaccgcaaccggcgtttcgggtcggtaaccaccgtctagcagtcgcggaacgatggcgtcgatctgggctgcggccaggtgcaagaccagagtggcgcgggatcgggcgagcgcggccaggtcctcaccgggcggtatgggtgtggacagcgtcgccacccgggtgagcgtcaccgtctgcgccacgcccggcacggtgagttcgcgctttagcgccgccgcggctgcggcaaaagccggtacgcccggcacgatttcgtagccgatgcccagcgcgtcgagttcgcggcactgttcggccagcgcgctgtacagcgacgggtcgccggaatgcagccgggcaacgtcgcggccgtcggcgtcggcgtcggcaagtttgcgcacgat

SEQ ID NO: 990 - DNA, 401 bp, Mycobacterium tuberculosis H37Rv
ggtcggtaaccaccgtctagcagtcgcggaacgatggcgtcgatctgggctgcggccaggtgcaagaccagagtggcgcgggatcgggcgagcgcggccaggtcctcaccgggcggtatgggtgtggacagcgtcgccacccgggtgagcgtcaccgtctgcgccacgcccggcacggtgagttcgcgctttagcgccgccgcggctgcggcaaaagccggtacgcccggcacgatttcgtagccgatgcccagcgcgtcgagttcgcggcactgttcggccagcgcgctgtacagcgacgggtcgccggaatgcagccgggcaacgtcgcggccgtcggcgtcggcgtcggcaagtttgcgcacgatttgttcgagggtcagcggaccggtgtcgacaat

SEQ ID NO: 991 - DNA, 401 bp, Mycobacterium tuberculosis H37Rv
cgcacgtcgacgctcaccccgaaggccgcggcattgaacccaatgttgcggcggcgccgttcgtcgcgctcgaacgccaccgcggtgcagcccggccagctccgacaccactggaccgcgatggcgcctgagcccgcgccgacgtcccataaccgctgcccgggccttggcgccagcgcagccagggtcagcacgcggatcgggtgtttggtgatctgcccgtcgtgcgcgaatgcctcgtcgggtgcccacgacgtgcgctcgtcgagcaggtagcgcacggcgatcacgttgagctcatcgacatcgaggggtgggtcgcaggcccatgcccgggccgtaccgtcgcggcggcgttcggccgggccgccaagctgttcgagcacgctgaacttggagtc

SEQ ID NO: 992 - DNA, 401 bp, Mycobacterium tuberculosis H37Rv
atgacgccatcgcggtggcgcccggtgaggtgcgtgaccgtggtctccggttataccttcgagccgaccgcagggtgacttgatcgtcaaatccacgacagtagccttacaccaagtccgaagggagtagcggtgtttgtcgatgttgaacttttgcattcgggggcaaacgagtctcactacgccggtgagcacgcccacggtggtgctgatcagctgtcgcggggacccctgctgtcggggatgttcggtacatttcctgtcgcccagacttttcacgacgcggtcggcgcggcccacgcacagcagatgcgaaacctgcacgctcaccggcaggcgttgatcacggtgggcgagaaagcgcgccatgccgcgacggggttcaccgacatggacgacgg

SEQ ID NO: 993 - DNA, 401 bp, Mycobacterium tuberculosis H37Rv
cgaaagatccgaacttgatgcgctgatcacctgccttgagcaagatgccatcgacgacacggcgtcagcactgggccagctgcaatcgatacgcgccggatactcggatcacctgcagcaatcgctggccatgttgcgtgccgatggctacgacggggcggggctgcagggattggacgcaccgcaatcgccggtgaaacccgaagagccgattcagattccgccaccaggcaccggggcaccagaggtgcatcggtggtggacgtcgctgacgtctgaggaacggcagcgtctgatcgccgagcacccggaacagatcggcaatctcaacggcgttccggtcagcgcgcgcagcgatgccaacatcgcggtgatgacgcgggacctgaatcgggtacgtg

SEQ ID NO: 994 - DNA, 401 bp, Mycobacterium tuberculosis H37Rv
cgtcaccaacccggcgtcgagatcgacattccaggtcttgggtcggtggaaattgacataccgggcacgccggccagcattgacccagagtggagccgccctccgggatctatcaccgacgaccatgttttcgatgccccactccaccgctgatcgacggcttcggctgacgcggcaggctttgctcgccgcggccgtggtgccgttgctagcaggatgtgcgctggtgatgcacaaaccccattccgcgggttcgtctaatccctgggatgattccgcgcacccgctcaccgacgatcaggccatggcccaagtcgtcgagccagccaaacagatcgtcgccgccgccgacctgcaggctgtcagagcgggattctcgttcacctcgtgtaacgaccaag

SEQ ID NO: 995 - DNA, 401 bp, Mycobacterium tuberculosis H37Rv
acggctacctcagccaacccgaccccgacacacccgcactcaccggcgaccgcacagcacgcatcgcacccacaatcgacgaactcggacccaccctggtcgaaacggtacgccgccacgacacactgccccccatcgcccaagccgtagtagtggccgccacccgcaactacggcgtccccgacaacgaaaccgacctcctacaccacaaaaccaccgagatccaccaagccgtactgaccacctaccccaaccacgacatcgccacggtggtcgattggatgctgttggcggcgatcaacgcactgatcgcaggcgaccagtcgggggcgaactatcaccttgcctgggcgatcgccgcgatatcaacgaggagatccagatgacgtcaatcgaatcgc

SEQ ID NO: 996 - DNA, 401 bp, Mycobacterium tuberculosis H37Rv
cttgcctgggcgatcgccgcgatatcaacgaggagatccagatgacgtcaatcgaatcgcatcccgaacaatattgggcggcggccggcaggccagggccggtgccgctggcgctgggacccgttcatcccggtggaccgacgctgatcgacctgctgatggcgctgtttggcttgtccacgaacgccgatctgggaggcgcgaacgccgacatcgagggagatgacaccgatcggcgggcacatgcggccgatgccgcgcgcaagttctcggcgaacgaggccaatgcggcggagcagatgcagggggtgggcgcgcagggaatggcgcagatggcgtcaggcatcggcggagcgctcagcggcgcgctcggcggcgtcatggggccgctgacccagctc

SEQ ID NO: 997 - DNA, 401 bp, Mycobacterium tuberculosis H37Rv
cttgcgatcgccactggacccaacaagtggcgacccgctgcacccggctccgccgcgcttgcgatcgccactggtgctactggacggcgccagcatgtggttccgctcgttcttcggtgtgccatcatcgatcaccgctccggatggccggccggtcaacgccgtacgcggcttcatcgactccatggcggtggtgatcacacagcagcggccaaaccggctggcggtctgcctcgacttggattggcgcccgcagttccgggtggacctgatcccgtcatacaaggcacaccgggtggctgagcctgagcccaacggccagcccgacgtcgaggaggtgcccgacgagctgaccccgcaggtcgacatgatcatggagttactggacgcgttcgggatcg

SEQ ID NO: 998 - DNA, 401 bp, Mycobacterium tuberculosis H37Rv
ttgtcgcgttcgatgcgtaagtaacgctcggcctggcggatctggtcctcgagcccgggcgaggtatgcaccggatgacggcgcaattgttcgcgcgacgactccagctccggatcgtgaaacccgccggcctcgctgacgcgccgggcggctggaataaccagacccgcggctgccgatcgcagcgccgaggccaggtcacgccggacccgcggctggcggtgctccacccgcttgggcagcgtcatcgaccccaccggcgtcgtgcccgagtagtcggccgaggagatccgtcccgcccatcggtgttcggttagcaccagcggacgcgggtcgtcgcggtcgcgggctgattccaggacgacggccagaccaccgcggcggccgtgggtgatggtgat

SEQ ID NO: 999 - DNA, 401 bp, Mycobacterium tuberculosis H37Rv
gaggctgccaatcggccatccggtcggcctcacggcgatgcgcgatgtggcgcagcaactcgcggttgacttggggctgcccttcggcttcgccgatccggtaatcgaacaggtcgaacatgcgcttgcccaccaagacgtgttgccacaacggcaccggccgatgctcgtcgaccaccaccgtggtgtcgccccgcaccgtctggatccaaccgccgaactcctcggcgttgctcaccgtcgccgacaggctgaccacccgcacgtcgtcgggcagttgcaggatcacctcctcccacaccggaccccgcatccggtcggcgaggaaatgcacctcatccatcaccacataggaaagcccctgcagcgcaggcgaatccgcgtagagcatgttgcgcagc

SEQ ID NO: 1000 - DNA, 401 bp, Mycobacterium tuberculosis H37Rv
ttgacccgatgctaccgcagcggccgcggcacccggagatttcgcgccgtcacggcggcgcagctgcctggtatgcatccagcgcggccgtcgcggcgtcgcgaacccgctgagcgagcgactccggcgccagaacgcgcacgtccgaaccgaagcccagcaataggcgcgtcatccaatcctcagaggcgtaggtcatggccacctcacaggagccgtccggcagctgtcgtagctcccgaatcgggtagtactccagcatccacgaggccgacggtgccacccgcaacgtcgccgacggcagcgataggtcaccgtcgaacagcgacgtgtccggtggcgcctgccgtgccgattccggcggaaccgcgggctcgcccaactcggcggcatcgacaatc

SEQ ID NO: 1001 - DNA, 401 bp, Mycobacterium tuberculosis H37Rv
tcggacccacactgctactgtgcccgatgtcgttggtgggcaactggccgcaggaagcggccaggtttgcacccaacctgcgggtgtacgcccaccacgggggcgcccggctgcacggcgaggcgttgcgcgaccacctcgagcgcaccgacctggtcgtgagcacctataccaccgccacccgcgacatcgacgagctggcggaatacgaatggaaccgggtggtgctggacgaggcccaggcggtgaagaacagcctgtcccgggcggccaaggcggtgcgacggctacgcgcggcgcaccgggtcgcgctgaccgggacaccgatggagaaccggctcgccgagctgtggtcgatcatggacttcctcaacccgggcctgctcggatcctccgaacgc

SEQ ID NO: 1002 - DNA, 401 bp, Mycobacterium tuberculosis H37Rv
gcccgacgattcgccgtcagactgcgggctttcctggtctaccagcaacgcttgcagggcggagccggtgatgcgccggaacgcgcgccgtggccggttggcatcgagaacggccacctctaagctggccacgccaagggtgggttgatcaccacccgaggtgtcggcactgccggcccgcaatgcagcgaccgcgatacgcagggcgtcggtcaggctggcgttctcggcatacgactctttgagcgcgttggcgatcggctccgtggtgccgcccatcaccacgaaatgcggctcgtcggcgatcgacccgtcgtaggtaatacgatacaactcagggcgtttcgtctcgccgtaatgcgccacctcggccacacacaactcaacctcgtagggcttgg

SEQ ID NO: 1003 - DNA, 401 bp, Mycobacterium tuberculosis H37Rv
tcgtggtgggcctggtgctgctgcagaccggctgcggcgtcgggtcggtgcttggctgggcggtgcggatgacgctggagcaccttgcgacggtcggcacgctggcggtccgggccctgccgatcgtgctactgacggcattggtgttcttcaacacctatgtctggctgatggccgccaacatcaacggcgagcggctgacgctggcgatggtttttctgctcgccatcgccggggcgttcgtcgtgtccaagacggtggaacgggtgcgtccgctgcttcgctcaacgacggtgatgccccaaggcagccaaagcctggccggcacacccttcgcgaccatgggcgacccctctcccggcttccccctcacccgggccgaacgcctcaacgtggtcttc

SEQ ID NO: 1004 - DNA, 401 bp, Mycobacterium tuberculosis H37Rv
ttttctgctcgccatcgccggggcgttcgtcgtgtccaagacggtggaacgggtgcgtccgctgcttcgctcaacgacggtgatgccccaaggcagccaaagcctggccggcacacccttcgcgaccatgggcgacccctctcccggcttccccctcacccgggccgaacgcctcaacgtggtcttcctgctggcggcctcgcaactcgtcgagatcctggtagtggcgtcggtcggcgccgcgatatacctcgttctgggcatgatcattctcactccgccgctgcttcgggaatggacgcactacgattcgatgaccacgacggtgctcggcatgacgttcccggcgccggattcgctcatccgtatgtgtcttttcctgggcgcgctgacgttcatgt

SEQ ID NO: 1005 - DNA, 401 bp, Mycobacterium tuberculosis H37Rv
cactacgattcgatgaccacgacggtgctcggcatgacgttcccggcgccggattcgctcatccgtatgtgtcttttcctgggcgcgctgacgttcatgtacatcagcgcccgcgcggtcgacgacgccgagtaccgcgcgatgttcctcgaccctctgatcgacgacctgcacaccgcgctgctcgcgcgcaaccgctaccgcaacaacgtggtgaccgcgccgtgcgccggtgttgacgccggtcacgtcgatgactaggttcaccctgatgtcggctcccgaacgggtaaccggcttgtccgggcaacgttacggggaagtccttctcgtaacacccggggaggccggtccacaggccaccgtttacaacagcttcccgcttaacgattgtccggccg

SEQ ID NO: 1006 - DNA, 401 bp, Mycobacterium tuberculosis H37Rv
atcaccactggacagcgggctatcccgggggatgccgaatgcctcagaacgctctgactcacccatgttgcgctcctttcccacgccaggaatcgcgcggcggatactccaacgctaccggcgatcggcgcttcatgttggcagtcgaatgccgatggaaagtaacaacttgtatcgctggtaatctcggccccgaatccagccgatcaaacggaccttgagaggagcactgtgaccgcgaaatccctagccacaggcgtagtgggcgacgcggcgatcagtgcggcggccgccgccgagacttctgctgcattcgcaagcggccggtagccgagcgtgtcgctggatgcgccgaaacatccgtgtaaccctgggcgccgccaccatcgtggcggcgttag

SEQ ID NO: 1007 - DNA, 401 bp, Mycobacterium tuberculosis H37Rv
gcgaccgcaagaacgctgacgatcaccacggtcacgaaattgcccatccaggatgcccaggttccatgcaggttgatccagccgagaaaggcggcccaggagaccacggccggggccgtcagggaacgcaacccggcgacgacaccgataagcagcgccagcagcagaacaaggacatgcgtcacagcgatccctcctgacacagacgttatgggcaatcaggccccagcggacgctaacacagcgtgggccccgccacaggatcagaatcggcagaacctgatgtccgacgccagaatcgctttggccccgatcgcagcgagctcatccatgatgccgttgacgtcccggcgcggcaccagggcgcggattgccacccagtccgggtcggccagcggggc

SEQ ID NO: 1008 - DNA, 401 bp, Mycobacterium tuberculosis H37Rv
gccgagcagcaccgggaacttttcggcgactccccgggtgttcatctcctcgaggttttccttcatcaccacggtcgacttcaccagcaggcccgacatgccgaccacgtcggcgctcttgtcctcggcgacttcgaggatggtggcgattggctgcttgatgccgatgttgaccacttcgtagccgttgttgctcaagatgatgtcgaccaggttcttgccgatgtcgtgcacgtcgcccttgacggtggccagcacgatgcgtcccttgcccgaatcgtcgtccgagcgctccatgtgcggttccagatacgcgacggcggctttcattacctccgccgactgcagcacgaacggcagctgcatctggccggagccgaagagctcgccgaccgtcttca

SEQ ID NO: 1009 - DNA, 401 bp, Mycobacterium tuberculosis H37Rv
tcgacgccccagttgccggtgatgtcgttgatcagccgctcggcgatctcgaccttcttctgcgcggtgcgggcctggccctcttcgtcgatggtcagcgcgaccaccgccgcgccgtgctcggcgaccagcgccatggtcttggcaaagcgcgattccgggccgtcgccgtcctcgtagttcaccgagttgatcgcgcaacggccacccagatgctccaaacccgcctgcagcaccgcggtttcggtggagtccagcatgatcggcagcgtcgaggacgtggccagccggctggccagcgccttcatgtcggccacaccgtcgcggcccacgtagtccacacacaggtccagcaggtgggcgccgtcgcgggtctggtccttggcgatgtccaggcactt

SEQ ID NO: 1010 - DNA, 401 bp, Mycobacterium tuberculosis H37Rv
gattttcttatcttctccgcagcatcgacggcgccagccgacgttgcggtgtgtgcgggtacgattccggtggagttgccgccacccctagagtgggcgaggatcgcaagagcaaattccgcgccggtaggacaacgataggaccgccattacgaagccgcccgagactcctgaattgagcgcggcctcacagcgtgtcggcgccttcggcgaagaggccggctatcacaaaggcctcaagccccgacaactgcagatgatcgggatcggcggcgcgattgggaccggcctgttcctcggcgccggcggccggcttgccaaggccggacctgggttgttcttggtgtacggcgtgtgcggggtttttgtcttcctgatcctgcgggcgctgggtgagctgg

SEQ ID NO: 1011 - DNA, 401 bp, Mycobacterium tuberculosis H37Rv
cgcaagagcaaattccgcgccggtaggacaacgataggaccgccattacgaagccgcccgagactcctgaattgagcgcggcctcacagcgtgtcggcgccttcggcgaagaggccggctatcacaaaggcctcaagccccgacaactgcagatgatcgggatcggcggcgcgattgggaccggcctgttcctcggcgccggcggccggcttgccaaggccggacctgggttgttcttggtgtacggcgtgtgcggggtttttgtcttcctgatcctgcgggcgctgggtgagctggtgctgcaccgtccgtcgtcaggctcgtttgtgtcgtatgcacgtgaatttttcggcgagaaggccgcttacgcggtgggctggatgtacttcctgcactgggcg

SEQ ID NO: 1012 - DNA, 401 bp, Mycobacterium tuberculosis H37Rv
tgaatcgatcatccgcaaccgttacgccagtaagccaccactgtacggaatggcaatggtcttcttggccatggccgtcgtcgccgtgaccgcgtactttcgcatgggctggtggtcgatcatcggttacgccgccgctgccattatcggagtgatcgggttcgcactcgccttccgcgacctgtcctgaatcgagcgcgacagaacctctaggaattctcgagtgattcggtgtaggcgctggcaaagcggccgagcgcggcgacctcggcatccatctggggcatcagcttggcaacggtgttgcggatgggacgttggcctacccgggtggacaacaacggcttgagccaacggaacagggccacccagcccgggcagtacacgcgatcttttcggcc

SEQ ID NO: 1013 - DNA, 401 bp, Mycobacterium tuberculosis H37Rv
caccacttcagtatcgccgagctgaacgcaggcatttgacaatggggcttcacatcatgatgctctataattcgcatcttgatgcacaatagtgggatgcgaaccacggtcagtctcgccgacgacgttgccgctgccgtgcagcgcttgcggaaggaacgctcgatcgggctgagcgaagccgtcaacgagttgatccgtgccgggctcacgaaacgacaggtcgcaaatcggttccagcagcagacgtacgacatgggcgagggaatcgactactccaacatcggcgacgcgatcgaaacactggacggcccggcaagcggctaatgctcattgacgcaaacctcctgctctatgccgtcgacgagcgtgccgcgcggcaccgcgccgcggttggctgg

SEQ ID NO: 1014 - DNA, 401 bp, Mycobacterium tuberculosis H37Rv
gcgccccacgtattcggcgagtgcgatcaccccggaaaacaccaccagcgcggtcaccacgacccacaggttgcggacgcccgaccggatgtcgtctttgaagaacaggcccagaatgcagatcgggattgtgccgatgatgacataccagcccagccgataatcggtgtttcgatgtgccttcacgaccaggccgtgcaaccaagcgctcaggatgcgcacaatatcgcgcgcaaagtagatcactacggcggcctcggtgcccaactggctcacggcggtgaacgaggcaccggcgtcgccgctgaagaagatccgcgacacgatcgccagatgtcccgaggacgacaccggcaggaactcggtcaaaccctgggccgcggccaacacgatgacttgcc

SEQ ID NO: 1015 - DNA, 401 bp, Mycobacterium tuberculosis H37Rv
ggctgggaagtcgcgtcggcgctaggcgccgaattggatgtatttctggttcgcaagctcggcgtgccgcagtggcgcgagctggcgatgggcgcgttggccagtgggggcggggtcgtgatgaacgacgacgtggtttccagcttgcgcatcaccgaccagcaggtgcgtgcggcgatcgacagcgagacggcagagctgcagcggcgcgagctggcgtatcgcggcggacgccctgtcgtcgatccgcgcgccaggatcgtgatcctggttgacgacggcatcgccaccggcgcgagcatgctggcggcggtgcgcaccatccgtgccaccggaccggagtcgatcgtcgtcgcggtcccggtcggtccggccacagcctgccgcgagctcgcggcgga

SEQ ID NO: 1016 - DNA, 401 bp, Mycobacterium tuberculosis H37Rv
gtagcgcgacgtacccaccgaaaccgacgacgacgtcggcgtcgacatcgtcgagcacgtcccgggcctcccggacggcgcgccacacccgcgacggcagccgggccaggtcgccgccgggcttgcgcggcatcggcaccgccgtgatcagctccaggtggtagccgcgctggggcaccagcctggtctctagtccacggagggtgcccaacgcggtaatccggacgcgcggatccaacgcgaccaaggcgtcggcgacggccatggcgggctcgacgtgcccggcggtcccgccgccggcgagaacgaccgacacggaatcagcagacggcgaggaaccacaagacggcgaggcggcatcggcgggccggggcgccgttgccccgcgcccgccggccggc

SEQ ID NO: 1017 - DNA, 401 bp, Mycobacterium tuberculosis H37Rv
gccgggcttgcgcggcatcggcaccgccgtgatcagctccaggtggtagccgcgctggggcaccagcctggtctctagtccacggagggtgcccaacgcggtaatccggacgcgcggatccaacgcgaccaaggcgtcggcgacggccatggcgggctcgacgtgcccggcggtcccgccgccggcgagaacgaccgacacggaatcagcagacggcgaggaaccacaagacggcgaggcggcatcggcgggccggggcgccgttgccccgcgcccgccggccggctggctgaccgtgtccttcacccgtaacgctgaccttccaatgcccgaacgcgccgtgtgcgacgctggcccgcgtaccgctggccagctccatgatgcactgatcgacgaaccgg

SEQ ID NO: 1018 - DNA, 401 bp, Mycobacterium tuberculosis H37Rv
acctcaacagtcgcaggcataccagtatcctcgcctgccacaacctgaacgactgggacatcgggcgcgtgtcgtgataacgcctcggcaaccgctgcgcgatcccggccgatcagcaccgcaccgaccagccgcgacgccatcgccgcaacctcggcgtgaagcgacgcgcccttgagcaggccaccggcgatccataccaccctcgggtatgcaagcaccgaagcccgcgcggcgtgcgggttggtggccttggagtcgtccacgtaggtgatgccgtcggcaacggccaccacctcggcgcggtgtcggcccactcgaaacgacgtgaccgcgtcggcgatcgcaccggcgggcaccccgaccgagcgggccagcgccgccgcggccagggcgtcaag

SEQ ID NO: 1019 - DNA, 401 bp, Mycobacterium tuberculosis H37Rv
ggagatatcggccactgcgcccccgacgatctcggcgatctgcgcgacggtcagctcgatcatgcgcgccgctcgagggcctctagcgcggcagccagctccacccggtcgtcgaacgggcggacccgcccgccgccgcgttgcccggtctcgtggcctttgccggcgatgagcaccacgtcgccggggcgcgcccaggcaaccgcgtgccggatcgcgtcccgccggtctgcgatctcgacgacctgggcatcaccgccgacttcggccgccccagccaggatttcgcggcggatcgccgtgggatcttcgtcacgcgggttgtcgtcggtgacgaccaccaagtcggccagctgcgcggctatccggcccatcggggcccgcttgcccgggtcacgatc

SEQ ID NO: 1020 - DNA, 401 bp, Mycobacterium tuberculosis H37Rv
ccgccggctcggcggggcgcgacgggctcaatatggttgacaaatttcatgattcgactccctcctgggtggtgccgactctggccagggccgcgtcgatcgccgttcgcgcccgctctccggcgccgtcgtcgtcgagcagcagcagcgcccagttggcctccatcgcgtaggcgtgcagctcgaacgcgagttggcgcacttcgatatccgcccggatctcgccccggcgttgcgccgtttcgacgtcggccgtgatggcggcgattccggcccgcccggtcgcggcgatgcggtcgcgcaccgggccaggctgtgagtccacgtcggcggccgcggccgcgaaaaagcagccgccggcacgtcgcgttccaggtatccgacccacgcatgcatgaggg

SEQ ID NO: 1021 - DNA, 401 bp, Mycobacterium tuberculosis H37Rv
cgtgcgacccgaacaacgccgagatcgccaccgacacctcgtcggcgccggccgccaggattcccatcgtggggcctgccgccgccgcactggcggcgctgatcgacgacccgatgttcgccaaatccgtggcggccgctgccatcacctccggcgccgcaatcacaaacgacatcccgcacctccgaccagctcagcacaacttcacgaatcccagacctgcgacaccgtcggcagggctttcgatcctataacaatctgaaaacaggatgtcgcactttccttaaaagagcttccgccaacccgatcgtcagcgcgcacatgttgcgcaaaagttgttggagccgaaacgaaccggcgcgcgccgttaccggcgccgccgccctaggtggcctgcaaga

SEQ ID NO: 1022 - DNA, 401 bp, Mycobacterium tuberculosis H37Rv
tggcggcgctgatcgacgacccgatgttcgccaaatccgtggcggccgctgccatcacctccggcgccgcaatcacaaacgacatcccgcacctccgaccagctcagcacaacttcacgaatcccagacctgcgacaccgtcggcagggctttcgatcctataacaatctgaaaacaggatgtcgcactttccttaaaagagcttccgccaacccgatcgtcagcgcgcacatgttgcgcaaaagttgttggagccgaaacgaaccggcgcgcgccgttaccggcgccgccgccctaggtggcctgcaagaccaaaggaggcccgggatcgggtgacagcgggacgttttcgcgctgcatcagccagcccgcgatgttgtggaacagcggggcggccgagt

SEQ ID NO: 1023 - DNA, 401 bp, Mycobacterium tuberculosis H37Rv
tagcagccgcagccagggttgatctgctgcgcggtaccggtcttgccggccatctgatagccgggcaccccggccgtcggcccggtaccctgctggtagcccatcggatcgcgttgcaccacggcacgcagcatctggcgcacggtctgggcggtctgcgccgacaccacgcgaatgtcgtcggggcgcggttcttcggttcggctgccgtcgggtgcgacggtggccttgataatgcgtgggggtacccgcactccatcgttggcgatggcctggtacatgccggtcatctgcagcaaagtcatcgaaagaccttggccaataggaagattagcgaacgtactgcccgaccactggtcgattggcggcaccagtccggcgctctcaccgggcaggcccac

SEQ ID NO: 1024 - DNA, 401 bp, Mycobacterium tuberculosis H37Rv
gcacctccgggccagaccgggcgggcggagcgggatcatcggggcctggtgtcacccggaccggcacctcgaggggcaccgccgcgggtttcgggggcggcggcggatcttcgggcaacttcgtgttcagcggcggcggtggaactccgtcagccggcttgggtgtaccgaccaccacccaattgccgtccggatcctgaaccaggtgggcggtatccctcgtcgggatcatgccctggcgacgagccgcctcggccagcgccggcgccgacgcagcctcgcgtacgtcgcgttccagcgcttccttgtgctgctgcagcatccgggtccgctcccgggcgttgctcagctggtaggacctctcggcggcatcggtggacaaccacagtgtgaggcctagt

SEQ ID NO: 1025 - DNA, 401 bp, Mycobacterium tuberculosis H37Rv
tgggccgggccggaccagccaacccaagggcgctgaagacagcataaacacgaaatagtcagttagtcgaagcaacttgtgtggtttccgcgagcccacccgccgaatcatcgatagcggccactcgcgccggcgcggaatacactgtcgggccataggcacgccaaatgagaaaggggcgccgcgctgagcctgaatgcaccggcagcaccggcagcggtccagttggccggcgccatcaccgaccagctgcggaggtatttgcacggccgccgccgtgcggccgcccacatgggcagtgactacgacggcctgatcgccgacctggaggatttcgttctcggcgggggcaagcgcctacgaccgctcttcgcctattggggctggcacgccgttgccag

SEQ ID NO: 1026 - DNA, 401 bp, Mycobacterium tuberculosis H37Rv
ccttgctgcggatcacccggctgatcggaatcgtgatcatcgcggtgtcgctgccgctgttgtggtggcggttccggcgcgacgaccgggccgcgctgaccggggtcgcatggtcgatgctgatcgtggtgctgttcgtacccgccgccctgccgtggtactactcctggccgctggcggtcgctgccccgttggcccaggcacgacgggcgatcgcggccatcgccgggctctcgacttgggtgatggtgatcttcaaacccgacggatcgcacgggatgtattcgtggctgcacttctggatcgccaccgcctgcgcactgactgcgtggtatgtcctgtatcggtcaccggaccggcgcggagtgcaggctgcaaccccggtggtcaatacgccatag

SEQ ID NO: 1027 - DNA, 401 bp, Mycobacterium tuberculosis H37Rv
gccccggcaggctcttgaccacctgaccggagttggtgaagaagacctgagggatcaccacgccaccagcgcgccgcacggccaccagatgaccttcccgcagctgctgggccaccttgctgaccggaacgccgagcagctcggcgacccggggcaggtcgtacgtcggttcgtcagggtccaaaacgtcatcgccagcgggaatgctgcccacccgcgcaagtgtagagcctggtgcgcggccaggcatgcgcgttaggcttccgttctgcatccaatcgcggcggccacctacgatgaccccgtggtcgaagctggcacgagggacccgttggagagcgcgctgctggacagccgctatctggtccaggccaagatcgccagcggcggcacctcgacgg

SEQ ID NO: 1028 - DNA, 401 bp, Mycobacterium tuberculosis H37Rv
aggcttccgttctgcatccaatcgcggcggccacctacgatgaccccgtggtcgaagctggcacgagggacccgttggagagcgcgctgctggacagccgctatctggtccaggccaagatcgccagcggcggcacctcgacggtctaccggggcctggatgtccgactcgaccggcccgtcgcgctgaaagtgatggattctcgctacgcgggcgatgaacagtttctgacccgctttcgactggaggcccgtgcggttgcccggctaaataaccgcgcgctggtcgcggtctacgaccagggcaaagacggcaggcacccgtttctggtgatggagctcatcgagggcggtaccctgcgcgagctgctgatagaacgtggtcccatgccgccacatgcc

SEQ ID NO: 1029 - DNA, 401 bp, Mycobacterium tuberculosis H37Rv
gccggccggtggccagcacgtgccaaatgatgacgatcagcttgtgggcgacggcgatgatcgccttcttgttggcagcgggactgcggaagccaccgaacttgcggacctggcggcggtagtactcgcgcaggtagccatcggtgcgcacggcggcccacgcgcactcgaccaggaccggctgcaggtgctggttgcctgtgcggcgggcaccgtgatggcgtttgccggccgattcgtggttgcccgggcacagccgcacccacgaggccagatgctcagccgaggggaaccaggccgccgggtcggcgccgatttcagagatgaccgtcgccgaggcacccaccccgatccccgggatcgatgcaatcagctcgcgtcgggcacaaaagggatgcatc

SEQ ID NO: 1030 - DNA, 401 bp, Mycobacterium tuberculosis H37Rv
gtagcgccaccgggcccacggagcgtgcggacgcgacagccggactgcgccgacgaccaacagcacgacaacgaacatgccaagcaacccggtccaaaccttgcccttgagcagcaccaccaccgccaacggcaacgtcaagaccaatcctgcgatcagggtggtttgcagcaccacccagttggcgccttgccgaaccggcaggaagaagatcagcgggtgtaggcccatgatcaacagccccgcgacggccactgcggcaaagacggcgtctaccgacgtgcgtccgtcttcctcccagtagacatcggacagatgcaggatcagtgcgtactcgtcgagcaccaaggcggccccgactccgaaaatgctcgccgctatggtgaattcgggttctcgac

SEQ ID NO: 1031 - DNA, 401 bp, Mycobacterium tuberculosis H37Rv
tcgatgaaatggttaccggccaacccctcgaaccgggagaagtccatcggcttgccaaaccgaacggtgaccctgccgaacctcagcatcttcctgcccggcgggttgacgacgttggtaccgatcatcgccaccggaatcaccggaaccccggtgtgcaatgccaaccgggctaggccggtcttgcctttgtagagccgaccgtccggcgagcgagtgccttctggatacatgcccagcagcttgccctgacccagcaacaccactgccgtctgcagtgcgccctgcgcggagtcggcattggtgcggtcgatgggaacctggccggagacgctgtagaaccagcggttgatccagcctttcagtccggtgccggtgaagtattccgatttcgccaggaa

SEQ ID NO: 1032 - DNA, 401 bp, Mycobacterium tuberculosis H37Rv
tcgagggactttagcagcgagctggattcgagagtccagctaagcgattggcggtcttccggccactcgtaggacatgatcaaggtgtctttgaagatggctgcgtccatcaacattcgcgctcgtttcgggtagccctcgtcgtcggcctctaggatctcgacttccttatactccgaaatccattgcgggtaggcttcgatgtcggcgatcgccttcatcacctcgcctggatccgcgtcgatgtaaatcgtctgtgtcgtcttgtccgccacctggctacttccctttccccgcaagcgggtcggccccgatcatctgcgggagctcccgatctcccggggagaaacggtactccctcgtgccaaccttgacccggttaagttaccggagaaaccccg

SEQ ID NO: 1033 - DNA, 401 bp, Mycobacterium tuberculosis H37Rv
cattcgcgctcgtttcgggtagccctcgtcgtcggcctctaggatctcgacttccttatactccgaaatccattgcgggtaggcttcgatgtcggcgatcgccttcatcacctcgcctggatccgcgtcgatgtaaatcgtctgtgtcgtcttgtccgccacctggctacttccctttccccgcaagcgggtcggccccgatcatctgcgggagctcccgatctcccggggagaaacggtactccctcgtgccaaccttgacccggttaagttaccggagaaaccccgatggggcgtgaccgttctagcactgtcttgacctcgaaggccatttttttgcccgcgacccgtcggtggtgcgtcattctggccaggttcatccgggccagctgccaggctgc

SEQ ID NO: 1034 - DNA, 401 bp, Mycobacterium tuberculosis H37Rv
catctatcaacgcctgatcgacggcgtctggaccgatgtcacgtgtgcggaggcagccaaccagattcgtgccgcggctctcggtttgatttcactgggggtgcaggccggcgatcgggtagtcatcttctctgccacccgctacgagtgggcgatcctcgatttcgcgattctggctgtgggtgcggtcaccgtaccgacctacgagacctcgtcagcggagcaggtgcgctgggttttacaagactccgaagcggtggtgttgttcgccgaaaccgactcacacgcgacaatggtcgccgaactctccggcagcgtgcccgccctgcgggaggtactgcagatcgccggttcgggtcccaacgcgctcgatcggctcacggaggcgggcgcctcggtcg

SEQ ID NO: 1035 - DNA, 401 bp, Mycobacterium tuberculosis H37Rv
agcttgcgaccgcggcggaccggggctgctactgcgcgccaagcacgcggtgttcgaccggctggtctaccgcaagctgcgtgcggcactgggtggcaactgccgcgccgccgtctccggcggcgcgccgctgggtgcgcggcttggtcacttctatcgcggcgccggtctcaccatctacgagggatacggcctgagcgggaccagtgggggcgtcgccatcagccagttcaatgatctaaagatcggaactgtcggaaagccggtgcccggcaacagtctacgcatcgccgacgatggcgagctgctggtgcgcggtggcgtggtattcagcggctactggcgcaacgagcaggctaccaccgaggcattcaccgacggctggttcaagaccggtgatc

SEQ ID NO: 1036 - DNA, 401 bp, Mycobacterium tuberculosis H37Rv
accccctggaggccggtgtccgtgagctgcggatgctgtcgacgcatgccccgccgtataaccgcaggtcgaagttcccataccggtggtggtgggtggcgctcaccgatgaagcatttccacgcctgtcggtcatccgggccccgcgacacgaccgcgtcgtcggcccgttccgatcccgctccaaggccgccgagacggcagcgctgctggcacgctgcacgggactgcgaacctgcaccactcggctgacacgttccgcccggcacggacccgcctgccccgagctggaagtgtcggcctgcccggccgcccgcgacgtcacggccgcgcaatacgccgaggcggtactgcgcgcggcggccttgatcggcggattggacaacgccgcgctggccgcg

SEQ ID NO: 1037 - DNA, 401 bp, Mycobacterium tuberculosis H37Rv
cccctggaggccggtgtccgtgagctgcggatgctgtcgacgcatgccccgccgtataaccgcaggtcgaagttcccataccggtggtggtgggtggcgctcaccgatgaagcatttccacgcctgtcggtcatccgggccccgcgacacgaccgcgtcgtcggcccgttccgatcccgctccaaggccgccgagacggcagcgctgctggcacgctgcacgggactgcgaacctgcaccactcggctgacacgttccgcccggcacggacccgcctgccccgagctggaagtgtcggcctgcccggccgcccgcgacgtcacggccgcgcaatacgccgaggcggtactgcgcgcggcggccttgatcggcggattggacaacgccgcgctggccgcggc

SEQ ID NO: 1038 - DNA, 401 bp, Mycobacterium tuberculosis H37Rv
gggctaggcaccttggtcgcgtttgctggtggcctcatcaagaacccctggaagccggttgtccccaccgccgagggcaaaaaggcggtgctctggacgtcgggttggaccccccgctaccagggcgagacgatctatctggcgcgcgccaccggcacggaggacggaccaccgttcatcaaaatgcgcccggaggatatggacgccggtggaatggagaccgtttttccctggcgggagtccgacggcgacggcaccaccgtcgaatcacaccataagctgcaggaaatcgcgatgggtatccgtaacccggtgatgctcatccggatcaaacccagtgacctgggccgcgtggtcaagcgcaagggccaggagagtttcaacttcggcgaattcttcgc

SEQ ID NO: 1039 - DNA, 401 bp, Mycobacterium tuberculosis H37Rv
tcggcacgacccgggaaggaaccgggcaaatcaagcacagcccggcgacgacccgggtcggcacgacccgggaaggaaccgggcaaatcaagcacagcccggcgacgacccgggtcggcacgacccgggaaggaaccgggcaaatcaagcacagcccggctaactggactggggcgccaccacccggcgcagctgccgagcgtatagccactcgatcaccggcatgcccgcggtgaccaccccggccaacccgtagctgatccaagatggcccgtcgtgaccgaccgccatgaggtaggtcgccgccgccacggcaatcaacgcaatgccaatcgcactggtcaacacgactgtcccgcgcaaccagatccggtccaccgcctcactggaccactcggcgg

SEQ ID NO: 1040 - DNA, 401 bp, Mycobacterium tuberculosis H37Rv
gactacccccacgacctcggcgccgccgaaccggccttcgccccgggaccggcagacgacgcggcgctgccgcccgccgcatatcccggcgtgccgccgcaggtgtcctacccgaagcgacggcacaagcggctgctgatcggcattgtggtagccctcgcgctggtgtcggctatgacggcggcgatcatatacggggtccgcaccaacggagccaacacggcaggcacattctcggagggaccggccaaaaccgcgattcagggatacctcaacgcgctggagaaccgcgatgtggacaccatcgttcgcaatgcgctgtgcggtatccacgacggcgtgcgcgacaagcgctccgatcaggccttggccaagctgagcagcgacgcgttccgcaagca

SEQ ID NO: 1041 - DNA, 401 bp, Mycobacterium tuberculosis H37Rv
gccgcgtccaggccgccaagctcggcaatcatccccttccccccgtcggtacatgcgctgccccccaaccccaccacgatccgagccgccccggcccgcagtgccgcggcgatgagctggccgacgcccttgctgtgggccgccagcgcggtttcgggcgtgggcgggccgccaagcaaccccagaccacaagcctgcgcacactccaaatacgcggttgccgagcccggatcgaacacccacgccgcgttcacgacggtgttcagtggcccgcaaacacgcagccggcgggtctctcctagccggctgcccagcacctcaacaaaacccggaccgccatcggattggggggcgacgatgaacgaatcgcctggtcgcgaccgcgtccagccggtcgcaat

SEQ ID NO: 1042 - DNA, 401 bp, Mycobacterium tuberculosis H37Rv
tcgcaatggccgcggcggcctccaccgcagacaggctgtcgccgtagcagtccggtgccaccaacacccgcatggcgggcagctggagtcggccgggccccaagctaccggtcgcgtcatccgaggcctgcgagcctttcatcactggccagagtaggtctgcgcacccacacgcgtacctaaacgcacgcaaattccaaacgggccccgccgcgaagtagcctggcgactgtgaagctgctgggccaccggaagagccatggacaccaaagggccgacgcatcacccgatgccgggtcgaaagatggttgccggcctgattccggacgcacgtccgggtcggacacatcgcgcgggtcgcaaaccaccggccccaagggccggcccacgcccaagcgcaa

SEQ ID NO: 1043 - DNA, 401 bp, Mycobacterium tuberculosis H37Rv
actgggctgctatgggccgccgcagcgtgcgcttgcggtgatgcgcgacgggtcgaccggaccgttcggggtggcggccgtggtcttggtcatcgccttgcagggcctggccttcgcgaccctcaccacggtcgggatcgctgggatcacgctggcggtcttatccggccgggtcaccgccgtactggtctgtcgccggttggtgccggcagcccacggcagcaccctgggctcgcgggtcgccggtacgcaacccgcgccggtggtggcggcctggctcgccgtcctgctcgccgtttcggtgccggccggtccccggccttggcaaggaccgatagcggttctggtagcggtgacggccggcgcggccctggcggcgcattgcgtgcaccggttcggcg

SEQ ID NO: 1044 - DNA, 401 bp, Mycobacterium tuberculosis H37Rv
atgccggtcagcgtatcgcgtagtgccatggtcacctcacccggctgaccgtcggcgattctgaactcgctggcaccgtgccgcacccgcgcgaccggggtgatgacagcggcggtgccgcacgcaaacacctcggtgatctcgccggcggcggctttcttctgccactcgtcgatatcaatcctgcgttcctcgaccgcgaatccggcatcaatagccaactgcaacaacgaatcccgtgtgatcccgggcagcagggaaccggacagctccggggtgaccagccgcgccgatccgccgctgccgagcacgaagaagatgttcatgccacccatctcttcgatatagcggcgttccacagcgtccagccacaccacctggtcgcatccgttctcggcggc

SEQ ID NO: 1045 - DNA, 401 bp, Mycobacterium tuberculosis H37Rv
cgcgaaacgacacgatggacccgtcggcccagcggtaggctttgagcccttcgaacacctcctgcgcatagtgcagcacgatcgccgagggatccagctcgatcgggccataagggattacccgcgcgttgtgccaaccacggccctcggcatagtcgatcgacaccatatggtcggtgtggtatttgccgaaacccggctcccgcagcatcgattcacgctgcgcgtcggtggccggattgaccgcacgtaacaccgtgaattgaagggagccgctggtcatgggccgattctatccgtgggcgaacggttattgacggcccggaggccactccgctgccaccaagtggtgactcagcgcgttttcacggcaacgaacggcggacacaccacttgacatt

SEQ ID NO: 1046 - DNA, 401 bp, Mycobacterium tuberculosis H37Rv
atcctgggcagctaccgattcagcgccttccgcagcgacaagaccgcgcccaaagacgccggactccgcaaaatcaccgtgctctgctgtgcaaaggacgccaagaagcgcgcgttgcacggtgcggccgtcgcgaccgcggtggccaccgcccgggacttggtcaacactcccccaagccacctgtttcccgccgagttcgctaagcgcgcaaagactttgagcgaatctgtcggcctcgacgtggaagttatcgacgaaaaggcgctgaagaaggccggctatggcggggtgattggtgtcggccagggctcgtcgcggccgccgcgactggtgcggttgattcatcggggatcgcggctggccaagaacccccaaaaggccaagaaggtggccttggt

SEQ ID NO: 1047 - DNA, 401 bp, Mycobacterium tuberculosis H37Rv
gtcgaagctgtccgcgatcgacgtccgccagctggggaccgtcgactaccggaccgcgtggcagctacagcgagagctagccgacgcccgggtcgccggcggcgccgacacgctgctgctgttggaacaccccgcggtctacaccgccggacggcgtaccgagacacacgagcgacccattgacggcactccggtcgtcgacaccgaccgcggcggcaagatcacctggcacggtccggggcaattggtcggctacccgatcatcgggctggccgaacccctcgacgtggtcaattacgttcggcgccttgaagaatcgctgatccaagtctgcgccgatctgggcctgcacgccggccgcgtcgacggccggtccggggtctggctgcccggcaggccgg

SEQ ID NO: 1048 - DNA, 401 bp, Mycobacterium tuberculosis H37Rv
ccgctgaaagcaaggccgccaaagctcaggcaaacgctgctcgtaaggctgccgcccgccagcgccgcgctcagctgtggcaagcgttcaccctgcagcgcaaggaggataagcgcctgctgccgtacatgattggtgctttcttgctgatcgtgggcgcatcggtgggggtcggggtgtgggctggcgggttcaccatgttcacgatgatcccgctgggggtgctgctgggtgcactggtggcgttcgtcatcttcggccggcgagcccagcgaacggtttaccgcaaagccgaaggccaaaccggcgcagccgcctgggcgctggacaacctgcggggcaagtggcgggtgacgcccggggtggccgccaccggcaacctcgacgccgtgcaccgggtg

SEQ ID NO: 1049 - DNA, 401 bp, Mycobacterium tuberculosis H37Rv
ttcgatgggtgacggtggccggcaacggcgcgccgaccaccgctgcgaagagcccgtttaagaacgttcaaggacgtttcagccgggtgccacaacccgcttggcaatcatctcccgaccgccgagcgggttgtctttcacatgcgccgaaactcaagccacgtcgtcgcccaggcgtgtcgtcgcggccggttcaggttaagtgtcggggattcgtcgtgcgggcgggcgtccacgctgaccaacggggcagtcaactcccgaacactttgcgcactaccgcctttgcccgccgcgtcacccgtaggtagttgtccaggaattccccaccgtcgtcgtttcgccagccggccgcgaccgcgaccgcattgagctggcgcccgggtcccggcagctggtcg

SEQ ID NO: 1050 - DNA, 401 bp, Mycobacterium tuberculosis H37Rv
gcgccacgaccggcgcacccggggtttggccggcgccgggttcttcagtcgcgccggccaacgggggcgctgctaggggcagtccgccgagcagcaacccgaaggacagcagcgccgagctcaacggtctgcggcgccacatggccgccatcgtctcaccggcgaatacctgtgacggcgcgaaatgatcacaccttcgtttcttcgccccgctagcacttggcgccgctgggcggcgtggtgccgccgattaaatacgccgtcacgtactcgtcaatgcagctgtcgccctggaataccaccgtgtgctgggttccgtcgaaggtcagcaacgaaccgcgaagctggttcgccaggtcgaccccggccttgtacggcgtcgccgggtcatgggtggtgga

SEQ ID NO: 1051 - DNA, 401 bp, Mycobacterium tuberculosis H37Rv
cgccggccaacgggggcgctgctaggggcagtccgccgagcagcaacccgaaggacagcagcgccgagctcaacggtctgcggcgccacatggccgccatcgtctcaccggcgaatacctgtgacggcgcgaaatgatcacaccttcgtttcttcgccccgctagcacttggcgccgctgggcggcgtggtgccgccgattaaatacgccgtcacgtactcgtcaatgcagctgtcgccctggaataccaccgtgtgctgggttccgtcgaaggtcagcaacgaaccgcgaagctggttcgccaggtcgaccccggccttgtacggcgtcgccgggtcatgggtggtggataccaccaccgtcggcactaggccgggcgccgagacggcatggggctgact

SEQ ID NO: 1052 - DNA, 401 bp, Mycobacterium tuberculosis H37Rv
attcgatgtgcccaacaccatccgccacagcccaattgatgtggcactctatgcatgcctatccccgaccaaccaccaccgcggcgacgcatcatgaccggaggcgaagatgccagtagaggcgcccagaccagcgcgccatctggaggtcgagcgcaagttcgacgtgatcgagtcgacggtgtcgccgtcgttcgagggcatcgccgcggtggttcgcgtcgagcagtcgccgacccagcagctcgacgcggtgtacttcgacacaccgtcgcacgacctggcgcgcaaccagatcaccttgcggcgccgcaccggcggcgccgacgccggctggcatctgaagctgccggccggacccgacaagcgcaccgagatgcgagcaccgctgtccgcatcag

SEQ ID NO: 1053 - DNA, 401 bp, Mycobacterium tuberculosis H37Rv
actccggcgactgggacgccatcgctgccgaggtcagcgagtacggtggcgcactgctacctcggctgatcacccccggcgaggccgcccggctgcgcaagctgtacgccgacgacggcctgtttcgctcgacggtcgatatggcatccaagcggtacggcgccgggcagtatcgatatttccatgccccctatcccgagtgatcgagcgtctcaagcaggcgctgtatcccaaactgctgccgatagcgcgcaactggtgggccaaactgggccgggaggcgccctggccagacagccttgatgactggttggcgagctgtcatgccgccggccaaacccgatccacagcgctgatgttgaagtacggcaccaacgactggaacgccctacaccaggatc

SEQ ID NO: 1054 - DNA, 401 bp, Mycobacterium tuberculosis H37Rv
tgttgaagtacggcaccaacgactggaacgccctacaccaggatctctacggcgagttggtgtttccgctgcaggtggtgatcaacctgagcgatccggaaaccgactacaccggcggcgagttcctgcttgtcgaacagcggcctcgcgcccaatcccggggtaccgcaatgcaacttccgcagggacatggttatgtgttcacgacccgtgatcggccggtgcggactagccgtggctggtcggcatctccagtgcgccatgggctttcgactattcgttccggcgaacgctatgccatggggctgatctttcacgacgcagcctgattgcacgccatctatagatagcctgtctgattcaccaatcgcaccgacgatgccccatcggcgtagaactcg

SEQ ID NO: 1055 - DNA, 401 bp, Mycobacterium tuberculosis H37Rv
acggcgtcgtccaaaccggctatcaggccgcggtattcggcgacgttgttcgtcgcccggccgatcgcctgcttggactcggccagcacggtggagtgatcggcggtccacaccaccgcgccgtatccggccggtccgggattgccccgcgatccgccgtcggcttcgatgacaactttcactcctcaaatccttcgagccgcaacaagatcgctccgcattccgggcagcgcaccacttcatcctcggcggccgccgagatctgggccagctcgccgcggccgatctcgatccggcaggcaccacatcgatgaccttgcaaccgcccggcccctggcccgcctccggcccgctgtctttcgtagagccccgcaagctcgggatcaagtgtcgccgtcagc

SEQ ID NO: 1056 - DNA, 401 bp, Mycobacterium tuberculosis H37Rv
gtgccgcgccgagcaagcccaccgcgccgaccagcaggccgacgtgtaccgcaccggcgacccggccgtcacggtaggtgatctgctccagcttggcggccgcccgaccgaacagggccaccggatgacctcgtttggggtcgccgaacacgacgtcgagcaggcagccgatcagcacgccgacggccctggtctgccaggtcgatgcaaacactccggcagcgtcgcacacgtggtctacgctcagctatttatgacctcatacggcagctatccacgatgaagcggccagctacccgggttgccgacctgttgaacccggcggcaatgttgttgccggcagcgaatgtcatcatgcagctggcagtgccgggtgtcgggtatggcgtgctggaaagccc

SEQ ID NO: 1057 - DNA, 401 bp, Mycobacterium tuberculosis H37Rv
aagcggccagctacccgggttgccgacctgttgaacccggcggcaatgttgttgccggcagcgaatgtcatcatgcagctggcagtgccgggtgtcgggtatggcgtgctggaaagcccggtggacagcggcaacgtctacaagcatccgttcaagcgggcccggaccaccggcacctacctggcggtggcgaccatcgggacggaatccgaccgagcgctgatccggggtgccgtggacgtcgcgcaccggcaggttcggtcgacggcctcgagcccagtgtcctataacgccttcgacccgaagttgcagctgtgggtggcggcgtgtctgtaccgctacttcgtggaccagcacgagtttctgtacggcccactcgaagatgccaccgccgacgccgt

SEQ ID NO: 1058 - DNA, 401 bp, Mycobacterium tuberculosis H37Rv
ttcgtcccagccccattcctggataagttggtctcgttggatgcccaatttgcgggcgtagttcgaggcgtgatccgccgcgaccaccgtggaacctccttcagtctccgcgggccatgtgcacaccgtcgcgatgggcattatcgtcgcacagccagaaccggtccacccgcccgcctcagaaggcggccacgcacattgtcaatgcctttgtcttggtgtcgttgagccgatcaacccgccggttgaattccgctgtcgacgcgtgcgcaccgatggcatttgccaccgcgcgggccgcgtcgacatatgcgttgagcgcatcccccagttgcgcggacagcgcggcgctcagactgcctgagaccgtcgaggcactgttgttgagcgcgtcgatggcc

SEQ ID NO: 1059 - DNA, 401 bp, Mycobacterium tuberculosis H37Rv
tggcccacgtcggcgcgctggaaggcttggacaacttgaccttcgtgatcaactgcaatctgcagcgactcgacggcccggtgcgcggcaacggcaagatcatccaggagctggagtcgttcttccgcggtgccggctggaacgtcatcaaggtggtgtggggccgcgaatgggatgccctgctgcacgccgaccgcgacggtgcgctggtgaatttaatgaatacaacacccgatggcgattaccagacctataaggccaacgacggcggctacgtgcgtgaccacttcttcggccgcgacccacgcaccaaggcgctggtggagaacatgagcgaccaggatatctggaacctcaaacggggcggccacgattaccgcaaggtttacgccgcctaccgc

SEQ ID NO: 1060 - DNA, 401 bp, Mycobacterium tuberculosis H37Rv
caagaacggttgccgttcttcgccgacctagaagcgtcccagcgcgccagcgtggcgctggtggtgcagacggccgtggtcaacttcgtcgaatggatgcacgacccgcacagtgacgtcggctataccgcgcaggcattcgagctggtgccccaggatctgacgcgacggatcgcgctgcgccagaccgtggacatggtgcgggtcaccatggagttcttcgaagaagtcgtgcccctgctcgcccgttccgaagagcagttgaccgccctcacggtgggcattttgaaatacagccgcgacctggcattcaccgccgccacggcctacgccgatgcggccgaggcacgaggcacctgggacagccggatggaggccagcgtggtggacgcggtggtacg

SEQ ID NO: 1061 - DNA, 401 bp, Mycobacterium tuberculosis H37Rv
gtacggcgtcaagatccccgacgaggacctcgccggtctgcgtaccgtcggtgacgttgtcgcctacatccagaagctcgaggaagaaaacccggaggcggctcaggcgttgcgcgcgaagattgagtcggagaaccccgatgccgttgccaacgttcaggcgaggcttgaggccgagtccaagtgagtcagccttccaccgctaatggcggtttccccagcgttgtggtgaccgccgtcacagcgacgacgtcgatctcgccggacatcgagagcacgtggaagggtctgttggccggcgagagcggcatccacgcactcgaagacgagttcgtcaccaagtgggatctagcggtcaagatcggcggtcacctcaaggatccggtcgacagccacatggg

SEQ ID NO: 1062 - DNA, 401 bp, Mycobacterium tuberculosis H37Rv
ggattcgacacggaaaacaccgtcgctatccatatgctcgatcccggagtaaggatgcggcccacggtcggtctgatggtccaccaacgcgtcggtgcccggctccaacgggtgtcaggtcgtctcgcgaccgcgcccgcatggactgccgtggaggtcgcacgacagttgcgccgcccgcgggcgctggccaccctcgacgccgcactacggtcaatgcgctgcgctcgcagtgaaattgaaaacgccgttgctgagcagcgaggccgccgaggcatcgtcgcggcgcgcgaactcttacccttcgccgacggacgcgcggaatcggccatggagagcgaggctcggctcgtcatgatcgaccacgggctgccgttgcccgaacttcaatacccgataca

SEQ ID NO: 1063 - DNA, 401 bp, Mycobacterium tuberculosis H37Rv
tgccggcaaggactgtcatccgacggacgcgggcggtcgcccgggacctgagaaacgctcccgccgagacaagcagcaactgccagagcaacgacgcgagcgctaccccgaccacaacagcgatcgcggtcgttgcgcgcaacgcgcgcgccagcgtcacggctactgcggtgaagtacacgaacgtggccgggttgatcgccgttaggccgaagatcaacgcaaaccgaacacagcccagctgtttttgtggggccggaaccggctccggcgatggacgcaacccgtgcccgattcccatcgcagcgatgaccagcagcacgatcgcaccgacgatttcgggccaaaccctcaacacgttgatcgtcggtgccgcaactgtctccaaatcgcggtagcgc

SEQ ID NO: 1064 - DNA, 401 bp, Mycobacterium tuberculosis H37Rv; identical to SEQ ID NO: 1063

SEQ ID NO: 1065 - DNA, 401 bp, Mycobacterium tuberculosis H37Rv
acttcgaccggcggaggacagcgacgactttctggcatggtcgagcacggacaccacgatcgacgatgccgtccacgtcaccggaccctacgactacctgctacacattcgggtctgcgacacagcggacctggaccgcctgttacgcaggctcaagacctccgcggaagctgcgcaaacccaaacgcgcattgcgctcaggtcccggcgttgacaccgcgccagcaggcgccaccaaacccttagccaactccccgactcagccaagtcacctcgccggcgtcgccgccgtcacgatacacctcgagcgcctggtcccaggccgttcccagcaccgaatccagttcggcggccagtgtgtccgcaccttgggccatcatcgcccgcagccgcatctcccc

SEQ ID NO: 1066 - DNA, 401 bp, Mycobacterium tuberculosis H37Rv
cggtgacctcgaaccgcagcaccgaccaggaacgcaaggcgttggctagtcgcgccccggtgcccaccggcccgacccaattagtgaccgcacgcaactgcggcggcagggccggttgcggcgtccagaccaggttcgccttggcctgtagggtcgacgacaacgcccactcgacatgcgggcacaccgccgcgggcgaggcgtggatgtacaccacaccggacgtcacgtcggcgaattggttcgacgctcgcatctgctgctccttcggttccacgagggacgtcttccccaacgacctggtgaacccgacaagcaggatgcctgctgtgaaatttcgaatttttgtgtcgtgcgtttctattgtgccttgtgatacccgtgttgcgctagtgtgcggt

SEQ ID NO: 1067 - DNA, 401 bp, Mycobacterium tuberculosis H37Rv
ccgcctgattggccgaaatggccgaatgtccgcgtcgagttgcactcgccggtccagtggggcgatttcgaattcctgatctcaaagcccagcccccagtcattgggccgctgcacaccgtacccgggcagtacaccgtccaggccgggaaactgcaccgtggtcgcgtcggcatgcatctgcgccgagaccgtcgatggacgcagcagatcacccgcgaacaccgccaagtccgcgaccgtcgaggtcgccccgaacccggcggcagcggggcccccgtccagccgggtggtcaccatgcccaggggttcgcacaccgcctcggtcaggtagcgcccgaactcgatccccgactcccgctgcacgctctcggccagcacggtgaaaccgtagttcgaata

SEQ ID NO: 1068 - DNA, 401 bp, Mycobacterium tuberculosis H37Rv
acggcggcacccaccagcaacaccgccaccgtcgtgccggtgatgatcacggccggcaggcgataccacgggattggcggggacttgggctcgggctccgcatgggcatcgtggtcgaagctcagcgacgggcgggccgctgtgtagccaggggccggcccgatgtgggagtcctcgtcggcctccgaccaggccaaagcgggctgcaggaccgacgccggcgcatcggccggcgccgtcgccgtcgccgaggtgaccgcggtcagcaccgttgcgctggtgtcgccgggtctgcgtgccgcccacaacgcgccgccgaaagcggccgtcaattgcggacgaggcgtcctgaccaccggcacgcagaaacgtccggacagcgtcgtggtgactgccgggat

SEQ ID NO: 1069 - DNA, 401 bp, Mycobacterium tuberculosis H37Rv
atcaccatgctggggtttggcacgttcgggttgctgtcgtttcacatggtcagccacggcgtgctggccgccgccatggtcccggtggtctatgcggccgcaatggccgcagatgcgctgacggccttggcctcaggcttcagctatgacagatatggcgcgaaaacccttgccgttctgccgattctgtcgattctggtggtgctattcgccttcacggacaacgtcacaatggtggtcattggcacgttggtgtggggcgcagcggtcggaatacaagagtccacgctgcgcggcgtggtggccgacctggtcgccagcccacggcgggccagcgcctacggcgtgttcgccgcagggctgggcgctgcgaccgccgggggcggcgccctcatcggctg

SEQ ID NO: 1070 - DNA, 401 bp, Mycobacterium tuberculosis H37Rv
ttacgtggtcctgaaaggccgaacgtggctcggcgggtatatggtgcgccattcccggtggctgtgggatttgcactacacaggaagcgttgtcgcccacccactggcggaccggtaggcaccgatcggtgccggcctgttttgggtagcggatcaagcgcacaaacgactcgcggtggccgaacaggatgatgttggcgagacgccccgtctggcatgaccgctgccgacgcgttcgagtgcggtcgagagccaaaggcggcttgatcagccgccaaccgcaggccgaagacgtgccggctcaggtgtgtgacgatcgtagccgtagcggtcgatgatctcgccccagtgctcatcgacaatcgcacgctgctcgacggtcagttgatagctgttggttt

SEQ ID NO: 1071 - DNA, 401 bp, Mycobacterium tuberculosis H37Rv
cacgattgtcgattgcgcgacagcgcattcggccgaggtatacctgcgtgctccggtggccgtcgatgccgccgtcgtttccatggccaatcgtgattgtgctgccggatttgcgccctacacaggccaatccgtcgacaccagcccatactcggtggcgtatctcatcgactcgcatcaggatagaaccggggccgatcccaccccgagcaccgtcatctgtttgctgcagcccgccaacggtcagttgctcaccgggtcggcccgtcgctgaccggacgacccgttgttcgggtgcgtggcacacgacaccaaccggtatcgtctgttgccgtgacttctccgattgctccgaataccaaaagcgacggttctcgctgatgactaccccacccgacaag

SEQ ID NO: 1072 - DNA, 401 bp, Mycobacterium tuberculosis H37Rv
gccgcggcggtcgccctggtgcagctcgtcccggaactgacgatccccggcgcacgccaggtgctcggtgtggtgctcgcgattttggcaatcctcaccagcggaatgggtctgctgcgctggcagcaggcggatcgcgccatgcgccggcacctgccattgccccgtcaccccacaccgggctacctcgcggtggggctctgcgtggtcggggtcgtcgcgctcgcattggtggtagccaaggcgatcaccgggtgaaccgtcactcgacggcagcgagcgatcgcgggctgcaggccgaacggacgacgctggcctggacccggacggcctttgcgttgctggtcaacggcgtgttgctgacgctcaaggacacgcaaggcgccgacgggccggctggg

SEQ ID NO: 1073 - DNA, 401 bp, Mycobacterium tuberculosis H37Rv
gtggccgatggcggcgcggaccttcctgtaaattgccggaattcacgattttgtgcggctagaccaacgccgggagccagcgtgcctgcgaggataggagcgcctcggccgatccgccggcgcagccgttcggtcacaacggatctgacctgctcagcctgcaagtcaaccacaagaccggtccaggctgatacgcaaaatatgtgagtgtacccgccgccacagcggcagcagctggatcccccttttggtggacacgagatccacccaataggctgggccgatcgggcgatagacattgtcagttcgtgccggcaccctgatcactgacctcaacaccgagcgtcgaccccgtccctatggtccaaggaaaacaatgtcatacgtggctgccgaaccag

SEQ ID NO: 1074 - DNA, 401 bp, Mycobacterium tuberculosis H37Rv
cacagtgatggttcaatgccatgttgaaaaggcgctggcgggtcacgtcacgactttcggcgacctgcagtccctcctgccgcgaggctgcagccgtgatgtcagcgttggtggaatatacgatcgaccgcccggcagcaccagtcctggtcaacacctgcgcgaccgctgagaccagcggctgtggcggagtctgcttgaggtctagaaacagagtcatatcgggcggagtcgcgccaatggcttgctccagtgtcggtatcggggtcgcccgttgccggtagggatggccctcgacgcccggcgtggtgaaattccatcccgcgttgagctgctggagttgctgaaccgtcttcgaattcaccgggccggcgccgtcggtcaacgttgccagatcggac

SEQ ID NO: 1075 - DNA, 401 bp, Mycobacterium tuberculosis H37Rv
tgtcgtccggatggccaatcgcaccccgatctgggcctccatcgatgcgagccgccttgacacagcttgttgagtcaacccgagttcgcgtgcggcgccgccaagactgccggcctcagcgatggccagaaagatttcgaagcaggtgagtccgggcatacgagagctgagcggcatgcctgatcaaatcacaaccaatggttgttcccaacaacattcagacccctagtgacgacggcccatgctcgaaaaatgcccccacgcgagcgtcgactgcggtgcctcgaaaatcggcatcaccgacaacgaccccgcgaccgccaccaaccgcaggctggcgagcacaattcgcaagccgccgatcgagcacgcggccgggcccttagggtccacatcacgcg

SEQ ID NO: 1076 - DNA, 401 bp, Mycobacterium tuberculosis H37Rv
ggcaatgagttcaacatcggctggtgacttcggtcgctgaagttcgtagacgtgcggcagccccgccatgcccgtgacgacgctccacaggttcagggcggccggtccagcaggcgggtccaccagcaccggcccaaaaaggcattgtccgtccaaaaagagcgtcggcacgccgtatccgcccgcggcgacaacccgttggtggtcggcgcggacgtcgtcgtgggtcgtcggatcatccagcgccgcgtccaaaatcgccgcattgacgccgacgtcgcacagtaggcgtcgcgccaccgcgggatcatgcggtttgccgcccagggtgtgcagctcatgaccgatcgctgcataccaccgatcaagcaacgacatgttcgttcgacgcagcagcgcac

SEQ ID NO: 1077 - DNA, 401 bp, Mycobacterium tuberculosis H37Rv
cgccagttgatcgtgattcccaattgcgcgcgcacatcacggatccacaccgaggtctgataggcgaacgggcacaaagggtcaaagtggaaatccacggtggtcatcagacctgagtcctccagctgatcgagtcgacacctcgatgacattgtgccgtgcgccacgttgtcagcggactgagtcgacccaacatctcgcggtgttcgccagggtgccgaaacaggtcaacgcggcggtatgaatggtcgacgcaccataggcgaggatgggctggtgttcgggctcgtcgttatcgttgcgctggtcgccgccgtggtcgtggggaccgtcctgggccaccgctatcgcgtgggccctccagtgttgctcatcctgtccggttccctgctgggtctgat

SEQ ID NO: 1078 - DNA, 401 bp, Mycobacterium tuberculosis H37Rv
agtgagggagccgggcttgactgatccgcgccacaccgttcgaatcgctgtcggagctaccgcgctcggcgtgtcggcactcggggcaactctgccggcctgctccgcacacagcgggccgggttctccccccagtgcgccgtcagctcccgcggccgcgaccgtcatggtagagggacatacgcacacaatttccggagtggtcgagtgccgcacctcgccagcggtaaggacggcgacgccgtcggagtcggggactcaaactacacgggttaacgcacacgacgattcggcctcggtgacactgtccctgtccgactccacgcccccagacgtcaatggttttggtatctcccttaaaatcggaagcgtcgactaccagatgccctaccagccggttc

SEQ ID NO: 1079 - DNA, 401 bp, Mycobacterium tuberculosis H37Rv
cggtcacatccccggcgccatcaacgttcccagcggtagtgtcctggccgacgacggcacgttccttggcaatggcgcccttaacgcactgctgtccgaccacggcatcgatcacggtggccgcgtgggtgtctactgcggctcgggtgtcagcgcagctgtcatcgtcgcggcactggcagtgatcggccaggatgcggagctgtttccagggtcatggtcggagtggagttcggatccgacccgtcccgtcggccgtggcactgcatagtcagacgccggcccagttctgcaggaaggcttcggtgacccgggcggcgttgttggccgcaatctgcttgtaaacgaagaactggacggggaagcccggcagatgcagcgggtcgccgggcccgtcggac

SEQ ID NO: 1080 - DNA, 401 bp, Mycobacterium tuberculosis H37Rv
tagcgccaacacgatcacctcgggtgacggtcttgtccgctcggcggcccttcagtgcccagccaatgcggccgaccccgcggcggccgcattcggtagacaaaggaagtctgacaccgtaggcgcctcgttgatcgcgttttcgccgagaaacgtgaaggccgtttgcccgcccgtgcggatcagctacgatcaaggcgacacatggaccagtcggccaaccatgcgtgtctgcccaccccgctggcgagcacaacagggcgcgggcaagatcatgagatgcctgtcgaagagacctccaccccccagaagctgccccaatttcgttatcaccccgatcccgtcggcaccggctcgatagtcgccgacgaggtgagctgcgtgagctgcgagcaacgtcg

SEQ ID NO: 1081 - DNA, 401 bp, Mycobacterium tuberculosis H37Rv
agggtgccgcgatgatagaaggcgtcgccgcagtgcaaaacccagcggtgaccggcatcgacagctaccgcggcgtgcccgcgggtgtgaccgggcatcggcaccagaacgacaccggtgccgatggaatcgaggggtttggccgatgcgaatccgcgccagggttccccgtcgggaccgtgctccaccagcttcgggccgtgggcccactgtccgcgtcgatatcgcagtcgctcgcggagcgaaggggcgtggatggcaccgcgggcttcggcggcggtgacgtggaggtgagcctcggggaagtcggcgatcccgccgatgtggtcgaagtcgaagtgggtgagcacaatgtgtcgaacgtcggacgtgcggtagccgagctgttcgatctggcgggc

SEQ ID NO: 1082 - DNA, 401 bp, Mycobacterium tuberculosis H37Rv
ggagatcaccgatgaacccgtcggtgaagttcgcagtcgcttttatgcgcgggctcccgaactgcaccgaagcccggtctttgccgtcgcggtggtacgcgagaccgtgggcgaccgcctcctgctcaacttccaccacgcggccttcgacggcatgggcgggctgcgtctgttgctctcactggcccgggcctatgcgggcgagcctgacgaggtcggtggccctccgatcgaggaagcccgcaaccttaaaggcgtcgccggctcccgcgacctgttcgacgtcctgatccgcgcccgcggcctggcaaaaccggccatcgaccggaagcggaccacccgggtcgccccggatggcggctcgcccgacgggccgcgcttcgtgttcgccccactcacca

SEQ ID NO: 1083 - DNA, 401 bp, Mycobacterium tuberculosis H37Rv
gcgaggcgctgggccgcttcgccgcactgtatcgcgacacactgctgacctgagggcccggcatgaccgacaacgagtgcccggccgacagccgacggcgccatgtcctgcggctcgccctgttcgccgggattttgctggggctgttctacctggttgcggtggcacgagtcatccacgtcgacggggtccgtagcgcgatcgtggtggcgacgggtccgatcgcacccctggcgtacgttgtggtgtcggccgcactcggcgcgttgttcgtcccgggcccgatcctcgccgccggcagcggggtgctgttcgggccgctactagacacctttgtgaccctgccagctttctcggccggcgcgcaggccggaatgacgcccaggcgctgctgggtgtcg

SEQ ID NO: 1084 - DNA, 401 bp, Mycobacterium tuberculosis H37Rv
ggtagtcagcaacgccacacgagtcaccggacaccggcgggcgtcgtcatgcccggttcactgtccgagcaccgccgtctccgtcaagaagcgccggatcgcatcgagcatcacccgcccatcgagtagttccgggtcgttgtgacccacaccgggaaccaccacgtatcgcttaggctcggcggccgctgcgaccagccgctcactaagcgtagcggggacgatgtcgtcgctgccgcccgcgatgaccagcaccggcgcgtgtacagaggcgatgcgctcgatcgacgggtagtggtccagcagcaaccggcgcagcggcagccacgggtagtgcaccgcgccgacctcggccagcgacgtgaacggagatctcagcacgagtgccgccggcggccgtt

SEQ ID NO: 1085 - DNA, 401 bp, Mycobacterium tuberculosis H37Rv
gacgcggggcaacgaaacagcagcaacgtcgacagacagcggaactgtcggctaccgccgataacgttgtgtcatgcgtgcggacatgtccgtcacctcgatgctcgaccgagaggtctacgtatacgccgaggtcgataagctgatcggcctccccgccggcaccgcgaagcggtggatcaacggctacgagcgtggcggcaaagatcacccgccgatcctccgcgtcacgccgggagctacgccgtgggttacgtggggcgagttcgtcgagactcgcatgcttgctgaataccgcgaccgccggaaagtgccaatagtgcggcagcgcgcagcgattgaagaactgcgtgcgcggttcaatctccgatacccgctggcacatctgcggccgttcttgt

SEQ ID NO: 1086 - DNA, 401 bp, Mycobacterium tuberculosis H37Rv
tgcccgtcgacaaggcctttcccgaaatcgtcatcaacccaagccgatatagcgggcagcccacgttcgttgggcgtcgtgtgtcgccggtgacgatcgcccaaatggtagacggcggtgaggaacgcgaggacctggccgccgactacggtctcagcctgaagcagattcaagacgcaatcgactacaccaagaagtaccggctggcccgactggtggcggcataaggcccggcgatgctcgaagtcgacaaagtcacccatgttgtcgatgaaaacctgcttcggcttggtgtggccttgtcgccgtcagaaaagacacggcccggtttggccgcccgcccgtcgacgacctgctaccgcaaggcatcctcgacaccgactggatccccatcgtcgggg

SEQ ID NO: 1087 - DNA, 401 bp, Mycobacterium tuberculosis H37Rv
ggtaagcatctccgcgtggctttcgttgtcttccatcatgtgctttggccaccagtagcgacgacatcaccataaatcgacaccctccgttgaattgcgccgtaaatcgccacgacgaaagccgacggtctccgctgcgccggggcctactcgccaacggcctaagagagaggcaagctggggcattattcgaacgttacgaaagccagttcgattcattcggatatatcgagaaggtgcggtatcggggctcagggtatcgagtcgaagacgtttatgcccgagcggacagtggacctagcgccggtgctgagcttcctgtcggcccatgagcggcggcgcggccgcacgctggcccccagctacgcgctggtgggcgccacgagcacgaccgcgtcgag

SEQ ID NO: 1088 - DNA, 401 bp, Mycobacterium tuberculosis H37Rv
tccagtccggcacctacagtttggcgccggtagcccgtgacgccctcttccactggggtgtggcgatgcttcccgccggccccgcaggccgggtaagcgtcaccaatggtattgctgcagctggtaattcggcgtccaaacatccggatgcggtgcgtcaggtgctggcctggatgggcagcacggagggcaactcctacctgggccgccacggtgcggccatccccgcggtgttgtctgcgcaaccggtctacttcgactactggtctgctaggggcgtcgatgtcacgccgttcttcgcggtgttgaacggtccgcgcattgcggcccccggcggcgccggcttcgccgccggacagcaggccctcgaaccctacttcgacgaaatgttcctcggccgt

SEQ ID NO: 1089 - DNA, 401 bp, Mycobacterium tuberculosis H37Rv
ggcgtgtgcgcgctggtctgtgcgaaagccgtagcccgccaacaccctttcgccaaccatcagcaggtcgccctgtccctcgttgacgtggcgggtggtcaccgggcgatatccgaccgaggacatccagctggcataggctctagactcaccagctcgttcggggaaccggaaccgggcgaccacggcgatgtcgtgcgcgatgaacccaccgttggcggtgtacaccatgtccggtaacccggaaatgggctcgatcagatccacgctgtggcctagccgaagataggtctggtggaggtgctcccactgtgcttgcgcgacttggacgtcgactggcgcggtgacgtccatccaggggttgatcgcgtatgcgacggcaaagaaggccggcggggtca

SEQ ID NO: 1090 - DNA, 401 bp, Mycobacterium tuberculosis H37Rv
gatgccggctgccgcaccaaggccgcctgcaacatccccatgtcggtgaccgttcggcggtcgtacactttccaagtcagaacggcggcagcggcgtagcacatcatgaagatccagaacgcatcggtcccactgccggtgctgaggtaggactcacgcagcgccatattgattccgaccccgccgagcgcgccgaaggcggccacaaacccgatgactactcctgagatgatgcgtgaccagtcgcggcgttcggcttcactgagatccagggagcggctgcacgcctcaaaaatcgtcggaatcatcttgtacacagacccgttgcccaacccggataggacgaacaacgcgacgaagcagacgaagtagccgaccatggtagcgccccgatgctggcc

SEQ ID NO: 1091 - DNA, 401 bp, Mycobacterium tuberculosis H37Rv
gtgccgtagttcggggtgtgctcgacctgcctcgccgagcgcccccgacaatcgggtcgccatctatgaaaggacatctagcaacattcggccacccagcgcttccgacataccgaggatcatggttgagtcgggaaccgggatccccctaccggcttcctgctggagccggacgagatcgaggcgatgcatgccgaaggattcctcgccgcactggatctggcactcttctgcggccagggcagcgctgtacgttcgcggcaaacgccgacccgatggccaagggcgtcgatcgtgcgctctgcgaaatcgtggccgaacgccggcaactggacctggacctggccaaagcccaagtccggtcggcgctcgccaaccagcgttaccatcgcgacgtccat

SEQ ID NO: 1092 - DNA, 401 bp, Mycobacterium tuberculosis H37Rv
cgaacggaggttgtgatgagcgacgcccgcgtgccacggatcccggccgcgttgtccgcaccaagtctcaaccgtggagtcggcttcacccacgcgcagcggcggcggctggggctgaccggccggcttccgtcggccgtgctcacgctcgaccaacaggccgaacgcgtatggcatcagttgcagagcttggccaccgagctgggccgcaacctgcttctcgaacagctgcactaccgccacgaggtgctgtacttcaaggtgctggccgaccatttgcccgaactgatgccggtggtgtacacgcccaccgttggcgaggcaatccaacgcttctccgacgaataccgcgggcaacgcggactgtttctgagcatcgacgaacccgacgaaatcgagga

SEQ ID NO: 1093 - DNA, 401 bp, Mycobacterium tuberculosis H37Rv
acgatgacatgcaaggaaccggcgcggtggtcttggccgccgtatacagcggtctgaaggttaccggtatcccgctgcgcgatcagacaatagtcgtcttcggcgcaggcaccgcagggatggggatcgccgatcagatccgggacgcgatggtggcagacggtgccacgctcgagcaggcggtgtcccagatctggccgatcgacaggccgggcctgttgttcgacgacatggatgacctgcgcgacttccaagtgccgtacgcgaaaaaccgccaccagctcggtgtggccgtcggggatcgggtcgggctgagcgacgcgatcaagatcgcatcgcccactatcctgctcggctgctcaacggtctacggagcgttcaccaaagaggtggtcgaggcg

SEQ ID NO: 1094 - DNA, 401 bp, Mycobacterium tuberculosis H37Rv
tggcgatgagcgtgaggagctgcgtgcggttcatgcgggccccgatctacatggatttcggtggcgatctgtgaccagacactaggctgcgccagcgacggcgtcagccgcttcggtcgattcgagccgaatggtcgacggctgcggaaccgaccgcaaaactggggcaaaaggttcaccgcgggtgtaagccagctaggtgaaccgatcccgctggcccatggcctatagtgggcccatgcaacaggccatacagctgcgctttatcctcccgcgccgcctcgccgtgggctgttgttgttgttgattcctggcgtccacagcaatcctcgcgctcttgcccgcaaacgggtggaaatcggtgttcgcccgcggcgtacagccgccgcgcactcacgagt

SEQ ID NO: 1095 - DNA, 401 bp, Mycobacterium tuberculosis H37Rv
gtcaaggagattgcggcattatcggttacggccgatgcccctcccacggtgtcgtattcgctcatccgggaggttttgcgcttgtaccaccgaaccggcgaaaaattgataatcacatttgccatgccagcatacgccaagatggtgatgaattttggtcgatttgcgatgcctcaagtgggcgaaccgttctatgcgcacagaaataatgaccctaggacatcgaatgatctcttgctggttccctcaatagtcgagccatcgaattttctcgagaatatttcccgcggggtcgtgacagcggatgacggcccgaccgcgagaaggcgattcgccaccctatgctatatgaccgacggccttgatgactatttcatgccgttgactcggcaggtccttag

SEQ ID NO: 1096 - DNA, 401 bp, Mycobacterium tuberculosis H37Rv
aaagggctgcagttccgcgcccaatagtgtcgtccgcaaccagatgcgctcgaaaaccgcgccggcagtcagcgcacccgacgcgaggtcgagagacgtcgtcagcgcgcccacatggggtgccaatcggcacggcaggtaggccgcgcgcaacccgagcgcgtggtgcatgcccacggtccgcaggaggcgcagcacccgccaatgccgaagcccacgaaacatcgggcgcatccacgcttcaacctcaagagacccgggcggcaacccatcgtcgctgctcgcggtccagccaatgtcgaagcggacggccgaaaagagttcttcgtgtagttcacgagatcgaaagcgctcagtttcggccaatctgaccaaccgaaggatctgtttcctggtctctg

SEQ ID NO: 1097 - DNA, 401 bp, Mycobacterium tuberculosis H37Rv
gcgtgcgaagcaggtgctgatgccacagtgctgatgtcacaaggaaccgcgagggggtcccggaccctacatggtgccgggcgaagtccacatgagtgatacgccgtcaggcccgcacccaatcatcccgcggacgattcgcctggccgcgattcccatcttgctgtgttggctgggatttaccgttttcgtcagcgtcgccgttcctccgttggaggcgatcggtgaaacccgggccgtggcagttgcccccgacgatgcgcaatcgatgcgtgcgatgcgacgtgccggaaaggtgttcaacgaattcgattccaatagcatcgcgatggtcgtcctggaaagcgatcaaccactaggcgagaaggcccataggtattacgaccacctggtcgatacgc

SEQ ID NO: 1098 - DNA, 401 bp, Mycobacterium tuberculosis H37Rv
gacattcgagacggtaccaagtacgatatcctcatcgttggtatagccgcggtatgcctggtatttattgtcatgctcatgattacccagagcctgattgcgtcactcgtcattgttggcacggtacttctgtcattgggtactgcgttcggactgtccgtgctcatctggcagcactttgtcggtctccaggtgcattggacgatcgtcgcgatgtctgtcatcgtcttgctggccgtcggttctgactacaacctccttttggtgtcccggttcaaggaggaggtcggcgctggattaaagaccgggatcatccgggcgatggccggcaccggcgcagttgtcacgtcggccggtctggtattcgcgttcaccatggcgtccatggccgtcagcgaact

SEQ ID NO: 1099 - DNA, 401 bp, Mycobacterium tuberculosis H37Rv
atcaggcgagtggcatgcactcaccaaccgcggccagctcggcaccagcttggtgtcggcgcacagagctgttcgggcccatacgtcgacgtagccgaacccgccccgactctcgtcggacacgttctgctgtttggcgtggccgaacgatcagatctcgtcgcgccgaacgtgtattgccgggccggtggaagagtctgtcgggagaaaaaggaaaagccctgcagagactggtgtgacacgccttgcgcagccacgcggtcggaaaaccgaaccttagctcatcagaacccaacacaagaggcgggacaagccgagttcaagccgaacgccctgctcccccgggaggactcgaacctccaacccttcggttaacagccgaacgctctgccaattgagct

SEQ ID NO: 1100 - DNA, 401 bp, Mycobacterium tuberculosis H37Rv
ccacgtcgttcggcggttcgtcgaacgcgccgggaagttcacccgacggcgggttcttgggcggcggcgggcggttctaagccacgcgccagcgcacggggatacccgtacgctggcgcgtgtggccgtcgacctaggcttcttcctagggttcgtcgaccctgtcaggcccagctggagccgacggcgctgtcggtttgtgccatgttgttgccggcagcctgcaccttctgcccgtgggcgttggcctgctcgtagatcacctggaagttacggcccagctgggtgatgaactcctggcaagccaccgaaccggcgccgccccaaaagtcacccgcggccaacacatcacgaacgatggcctgatgctccgcctccagcaacccggcctgagcgcggat

SEQ ID NO: 1101 - DNA, 401 bp, Mycobacterium tuberculosis H37Rv
aggacgcaatatgagtgcagccggtgtccgctctacccgccagcgggcagccatctcgacactgttagagacgctcgacgactttcgttcggcccaggaactgcacgacgaactgcgccggcgcggcgagaacatcggtctgaccaccgtctaccgcacactgcagtcgatggcatcctccggactggtggacacactgcacaccgacaccggtgaatcggtctaccgcagatgctcggagcaccatcaccaccatctggtgtgccgcagctgcggttccaccatcgaagtaggtgaccacgaggtggaggcgtgggcggcggaggtggccaccaaacatggattctctgacgtcagccacaccatcgagatcttcggcacctgctcagactgccggagct

SEQ ID NO: 1102 - DNA, 401 bp, Mycobacterium tuberculosis H37Rv
atgacgtcgttgcttttggtcatctcctccgcgaccgccaactcattgatgacgctacgccacagccgtggtcgtgaacccacccaccggatccggacccctagcttctttagggtgtctcggcgccgtcgcaccacgtcgcggttgaagcccatcaggaagcggacttcctcgggcgaacgcttccagttctccgtggagaaggcgtagaggctgagccacttgatcccaagttcgatagcaccgcaagcgatgtcgatcaccaccgcctcgcccatcttgtgaccttcggtgcgggccagcccacgttgggtggcccagcggccattgccgtccatgacaatggcgacatggttgggcagccggtcggccggtattcgtggcgcggccgctttcgaagt

SEQ ID NO: 1103 - DNA, 401 bp, Mycobacterium tuberculosis H37Rv
cgaagctgctcgacaatccaccggtctcccggaccgatcgcctcgtcggcggggatgcatagcccgatgacgtcgaccgccgcgtaggtttcgcggaccaagtcgttgagccgcttgcccagcagagtgcgcggccggtgcagaccgggagtgtcgacgaggatgatctggaagtcgtcgctatgcacgatcccacgaatggcgtgcctggtggtctgcgggcgcgtcgacgtgattgccactttcgccccgaccagcgcattggtcagcgtggacttgccggtgttcggccggccgaccaaacacacaaagccagaatggaattcggtcatgccggtttcctcgccgaacgtgaacacagggagacttttcccgcttttttccgccgtgaatgcacgttc

SEQ ID NO: 1104 - DNA, 401 bp, Mycobacterium tuberculosis H37Rv
tgttctcgcgcgctgggctgggcgcgcgcccggccgccagcgcgtgcaggccggcgtcgagttcacccagcacaatccgccaggaggctgggtccatcgccagcacatgggcggtcagcaccagaacaccgggcccgtcgggttcgcgcagccacaccgccgagagcagtcggccggcctgggggtcgagactcgccagcgcgccaagagtctgctcggccaccgcggtgaccagttcaccgctgacccaaacctcgctgagaatgtccgttttcggttgtgcgacaagggccatcgcatcccggtcgaaccggcaccgcaacacctcgtgtccgtcgacgaccgcggccaacacggcatccaggcgttcgcgggtgatccggtcgggcaacctgatgacc

SEQ ID NO: 1105 - DNA, 401 bp, Mycobacterium tuberculosis H37Rv
gcccgcaattcggccaccggtggcggttgtggtccgcctgccacatacgccgtcagccgggggccactggcatggccgcgggccgtcacatggcaaccgtgcaccgcatggtggccgttgagcaccgcggcaatctcacccggctcgacgcggaaaccgcggatcttcacctggtcatcgctgcgcccgaggaactccagtccaccgtcgggcaggcggcgcaccacatctccggtgcggtacattcggctaccgcgcccgtttggctcagcgacaaagcgcgccgcagtctcggccgggcggccgaggtaaccgcgggtcaactgggcgcccgccagatacagctcgccggcgacgccatcgggcaccggccgcagccaggagtccatgacgtaggcgcg

SEQ ID NO: 1106 - DNA, 401 bp, Mycobacterium tuberculosis H37Rv
cgaacaacgcgtcgcgggtctgcgggtctagccagtgccagcgccgggtgctgcggcgccggtcgcgttcgccgccggcccgggtaggcagcgcgggcggatccggcagctgcgggatgcgctgcgcccaccagtcccggtcggcgtcgcgaaccggttggggcagcgtctcctccgcctcgatagcctgccggtattcccggtaggtgtagcccagtgccggcggttcacggccgtcatagagggccgccaggtcggccagcaagatgcggtagctcatcgcgtcagcggcctgcatgtccaggtcgacatgtaggcgggtgcgctcccccggtaataacgtcaacgcaagttcgaataccgcaccgtcgagctgctggtgcgatttggcgtcgcggatc

SEQ ID NO: 1107 - DNA, 401 bp, Mycobacterium tuberculosis H37Rv
gcccggtcgacaccaattggacacctcgtaccaggcaaacccggccgccgacagccgagcatcgaccaactcgtagcgatgcgccagcacgtcgtcatcgggcgcggccagctcaccacgccgaacccggcgagccagtgccgtgccgtgctcgacgaccaaggcatacgcggacacatgatccacaccggcctgcaccgcggcgtccactgagcgcaccaggtcgtcgtcggactcccccggggttccatagatcaggtcgaggttgacgtgtgtgaagccctccgctatcgcctcggtggccgcggccgccgcccggcccggcgagtgcacccggtccaaggttgccagcaccctcggggccaccgactgcatgccgagcgacacccgcgtgtaaccgg

SEQ ID NO: 1108 - DNA, 401 bp, Mycobacterium tuberculosis H37Rv
cggtcgaaccctcgagaatgtccctcatgttgtggtcgatccgctcacagtccatggtggccagcttgacgacatagctgcgtgcggcctgcagtgcctggccggcggcgacgtctgtctgatgcttctcaaagagcacccatccgcaccatccagacccggccaacgacacaaccaccgcgacggcgccaacccagccaatcaccgatctggttaaccgaccgcggccgggagtttcggccggttcgccggtgccgcctggctcacttgcaccgtggccccggccgaagatggccattctgcgcacgattgacctcgatcactatccgctaagacaactatctcagtagtcatatttggtcacatctgtcactcctgtcaacgtcaggtgcgcgtctccc

SEQ ID NO: 1109 - DNA, 401 bp, Mycobacterium tuberculosis H37Rv
gcccgagcctcgggacggtcgatcggagtaccgggcatcctgcgaatgctggagatggtgcacaacgagcacgggcgcacaccctggcgcgacctcttcggccccgcggtaacgctggccgatggcggttttgacatcagcgccaggatgggcgcggccatctccgacgctgcgccgcaactgcgagacgacccggaggctcgcaagtatttcctcaatcccgacggcagcccgaaacccgcgggaacccggctgacgaaccccgcgtactcaaaaaccctgtccgccatcgcctccgccggcgccaacgccttctattccggcgacattgcccacgacatcgtggcggcggcgagcgacacatcgaatggccgcacgccgggcctgttgaccattgagga

SEQ ID NO: 1110 - DNA, 401 bp, Mycobacterium tuberculosis H37Rv
cggcatgccatcgtcgggtggcgtcgccgtggccgcaaccttgggcatcctcgagcacttcccgatgagcgactacgcgcccagcaaggtcgacctcaacggcggtcgcccgaccgtgatgggggttcacctgatagcggaggccgaacggctggcctatgccgaccgcgaccaatatatcgctgacgtcgattttgtccggctgcccggcggctcgctcaccacgctggttgacccgggctacttggcagcacgcgccgcgctaatctcgccgcaacacagcatgggcagcgccagaccgggggacttcggcgcaccgacggccgtcgccccgccagtgcctgagcatggcaccagccacctcagcgtcgtcgattcgtacggcaatgcggccacgttga

SEQ ID NO: 1111 - DNA, 401 bp, Mycobacterium tuberculosis H37Rv
cggccaacgcattggccgccccgcaagccgcgctcatgtccgcgctggccaagggagtatttggtggctcgctgaactggtcgctggtcggtgtaggggccttgaccggcgtgatagcggtcgcgctcgacgagacactggccaagacgacaaccaaccttcggctgccgccactagcggtgggtatgggtatgtacctgtcggccgcactgacgctgatgatcccgatcggcgcattcctcgggcggatctatgactcctgggcgcggtggtctggggatgacgacgagcgcaagaaacggttgggcgtcatgctcgcgacgggcctgattgtgggcgaaagcctatacggggtgctctttgccgtcatcgtcgcgacaactggcaaagaggagccgctg

SEQ ID NO: 1112 - DNA, 401 bp, Mycobacterium tuberculosis H37Rv
tctgggaaagcctggatgtcgttccccccgagtcgctatagtcaactgcgccgatgggtcaatgctggccaggcgatgctctggtcgacatggcttagcaatcctgacattttggaggtgccggatgtcgttcctgattgcttcgccggaggcgctagcggcgacagccacatatttgacaggtatcggttcggcaatcagcgcggcgaacgcggtcgcggccgccccgacaacagagatcctggcggcggggaccgacgaggtgtccaccgccatctcagcgctgttcggcgctcatgcccaggcatatcaggcgctcagcgcccacgtggcggcatttcacgaccagttcgtgcataccttgaccgccggtgccggctcatacatggccgccgaggccg

SEQ ID NO: 1113 - DNA, 401 bp, Mycobacterium tuberculosis H37Rv
gatgcggcgccggggagcgggggggccggcggggccggcggcatcttgatcggcaacggcgggaccggcggcgccagcgacttagccgggaccggccgcggcggggtcggcggggcgggcggcgccggcgggctcttcggcatcggcggcgccggcgggggctgcgggtccgcggtggcgatcgggggtgacggcggggctggtggcgccggcggcgtgttcagcggcggcggcgccggcggggccggcgacgccatcgggggtagcggcggcgcgggcggcaccggtgggctgttgggtggtggcggcggcgcgggcggcgccggcggcgccggcggcaatggcgggggcgccagcaacagcgcaagtatcgggggtgacggtgggtccggcggcgcggg

SEQ ID NO: 1114 - DNA, 401 bp, Mycobacterium tuberculosis H37Rv
cgcgggcggcatgctctacggtgccggcggcgtcggcggcaacggcggggccgcggtcgctatcgggggtgacggcggggccggcggcagggccggagcgatcggcaacggcggtgacggcggcaacggcgggacttccaacacccccggcggtagcggcggcgacggcggcaatggcgggaacgccggactgatcggcaacggcggtaacggcggcaacgccgagattgtcatctccggcggtagcgtcgccggcaccggtggcaacggcgggttgctgttgggcttcaacggcacgaacgggctgccgtagcgggcgagcccgccggcctctggatcacgtcgatgtgactttgacccgttccacgccggcatcgtcgacgcccgatacgccaccggca

SEQ ID NO: 1115 - DNA, 401 bp, Mycobacterium tuberculosis H37Rv
gccggctatggtgcgcaacagcgtcgacttgcccgaaccgctggggcccaacaatgcggtcagcgaaccggtcggtacgacgaaatccacgtggtcaagtgcgacgaagtcgccgtagcgtttggtggcgtcggccacgacgatggcgtaggtcattttcaccgtctccttctcagccctcgctgaccgctcgtgcccggcgggcgtctagcaccatctggacgatcagcaccaccacggaaaccgccatcagcagcgtcgacagcgcgtaggcaccgtactcggccccacggtggtagcggtcggagaccaagagggtcagtgtttgcgatgtccctggaaggttcgacgagacgatgatgaccgccccatattcgccgagggttcgagcgacggtcaat

SEQ ID NO: 1116 - DNA, 401 bp, Mycobacterium tuberculosis H37Rv
ggagtgcgtgccgcgtcgcagcgagaccgttgccgcgacaactgaatccgcaacccggacgtcggtgatggagcgttgaccgaacgcgctggcgggcaccgtcagcgttgtgccatcacattccttccactgcgcagaaaacctcgcgaacagatcatcggcggctgccgcggaaggcagggcgacgacaccctcatcgacgtcatccaccttcaccgaggaaccgtcgtgtcgccacgacacccgggcgacgcttttgacctcgacggaccggtaaacgttccgctgcgtcaggtaaccgacgcccacgcagtcagcgggccgagccgatacatcactgtctcccaaactgtcgctgcccccgaacaccggcgggaaaggtggaagggcctgaaacggct

SEQ ID NO: 1117 - DNA, 401 bp, Mycobacterium tuberculosis H37Rv
ccctcgcaagcctccagcgcacgcgagacttcgtaggtgaagtcgacatggcccggggtgtcgatcagatgcagcacgtagtcggtcttgtcgacccgccagggtagccgcacattctgggccttgatggtgatgccgcgttcccgctcgatgtccatccgatccaagtactgggcccgcatagagcgttcgtcgaccacgccggtgagctgcagcatccggtcggccaacgttgacttgccgtggtcgatgtgggcgatgatgcaaaagttcctaatctgcgccggcgcagtgaaggttttgtcggcgaaactgctgatgggaatctcctggagcgggggttgacgggtatccagggtatccgcgtcgggcagctgcgacccaatcgcgctcggtcgatc

SEQ ID NO: 1118 - DNA, 401 bp, Mycobacterium tuberculosis H37Rv
gtgtccagccaggagcgccatgctgccgaccgggactgggtgggaatcggttctggcgcttgggactacgagggccgagaaagctgggtacggctggaccgggtgctcgacgtacccgaggagagtatccgccgcgaaggcgcgattctggaacgcgaggtcttcgacgtggtagccgcccggctgcgtgccgactacgcctggcgctaaaccgggccgggcggccagcgcaatcggctgggcaacgagccccgatcaggccccaatcagccccgcctggcgacgacgcgggccgcccagcggcccgctgaggagccgggcagtcagccccgcccggcgacgatgcgggccgcccagcggcccgctgaggagccgggcaatcagccctgagtgatgtagga

SEQ ID NO: 1119 - DNA, 401 bp, Mycobacterium tuberculosis H37Rv
cactcgagggccttgacccgctgggtgatgccacgttccagtcgggtccactcgggggccgaaatgacccgtggcaccaggtcgagcgggaacggccgctcctggcccgacagcgaaaacgtgatgccctggtcgatgaacgcacgccccagcgcatcagcgcgggccttgagttcggacgcgtccgacggcgccagctcagcgtagatacctttgtaggggccgcggacaatgccctgggcatcgaacatttcgtcgaaggccatcgcatagacgtccgacgtgttgtagccgccgaagatgcgttcgccgcgtgtgggcgaccgccgccgggtctcgttgagttggtttggcagactcacgcgtctcatgctgcctcaaattcgacattccggcagacc

SEQ ID NO: 1120 - DNA, 401 bp, Mycobacterium tuberculosis H37Rv
cgcgccacacaccaccacagtgcgccgccgccgagggccaccacgacgcagcacaaggcacacacgttgccgatcggccacacgatcccggccgccgtcacaatccagctgaccagcgccgccgggaccaggcgtacgtccaaacgggacgcgccgaagcccatatggcgcaccggtatcagacacggaccagattgcgccgcttgtccagccgcgccggaccgatgccgtcgacgtcggcaagctggtcgacgctggtgaacctaccattgcgctgccgccacgccacaatcgctgcggcggtgaccggcccgatgccgggcagggcgtccagctgctccacggtcgcagtgttgaggtcgagcacctcagctgtcttaggagctgtcttagggcctgtc

SEQ ID NO: 1121 - DNA, 401 bp, Mycobacterium tuberculosis H37Rv
ggtggtagcgggcccgtagccgaaccggccgtagatgccgccctcgctagcatgcagtgccgcgaccggatagccggaatcggctatgcggcggtgcagttcggcgcacatcgcgcgcagcaagccgcgccggcgatgcgtcggcgccaccgcgacgaaactgagaccggcggtcgggagcaccacttcaccaggcaccgtcaaccgcagatccatgtacagcgccatcccgaccacctcagaacccgggccggcaccatcgcggaccaccaccgctccgtcggtgggcaccagggtccgccaggcggtcgctgattcagggccgatgaaatcggtgaaactggccgcggccagtaggaacatccccggccagtcgtcctcggtcgggctacacagggtca

SEQ ID NO: 1122 - DNA, 401 bp, Mycobacterium tuberculosis H37Rv
cggccgtgatgggccttgccgtaggtctcggcgatatgcaccgagggcagcgatgcgatgatcggtatgcccggacgattgaaatcaattgcaccacgggtcttttcaaggtactcagcggtcaggtgcggcggcaacgccgcacgggccactggcgacagtcgcggttgaacccaggcgtagccgtcgcggacccaccgtcgcagccaagacggacgtacatagcggatgagctcacgcagcgccgtcggtaataccgacggcagcgaatccattccgccggtcgcgaagatcaccgctccggccctgggtaacgccgcccaagcgcgcggatcctgggttgccgcccaccagacatcccgacaggtccagccgatgcggccaatcagctctaaatccca

SEQ ID NO: 1123 - DNA, 401 bp, Mycobacterium tuberculosis H37Rv
caatgcgggcctgcgcccgcgcctagaggacatcgctggagacctgcgccgaagcattccacacatcaaggcgccaccggatgctctcgaagtcggagcccggggcccaatggccactcagctgagtccaactggcattgcccatgccgcccaaagccggccagttggccaccggcaacttcagcagcgccgccgacaacgcggcgatcagacccccatgggctaccagcaccaccgggcgatccggctcgtcagcgccaccccattccggttcgctggcaaccaactcggcaaccaacggccgacttcgggcagccacgtcaaccctgctttccccgccgtgcggcgcccaggtcgcatcctcgcgccaggccaaccgggcgcccggggcatcagcgtcg

SEQ ID NO: 1124 - DNA, 401 bp, Mycobacterium tuberculosis H37Rv
ccagctgcccggagacatcgatgaccacgacgtcatcggcgagcttggcggcggccgcgccggcggccaccctcgccatgtcgatggcttcccggttggcggtcataggccattcccagcggccaggctggtcgttgaacgcgcgcccgcgtcgcaggcgccacagtagagccggcacttggagacatactgcacgacgccgtcgggcatcaggtaccacagcggccgggactgctcggcgcgctgacggcagtcggtcgacgaaatggccagcgccgggatctcgaccagagtcaacgcatccttggccagctgacccagcaggctagtgatgtgttcgttgcgcaactcgtagccgggccggctgacccccacgaaccgcgccaattcgaacagctcct

SEQ ID NO: 1125 - DNA, 401 bp, Mycobacterium tuberculosis H37Rv
ttgccgcagttccgttcgcggcaactgccagccagcctaagcgagcagccattgataaggcagcacgattggttattcctaagcctttgcgtgatcatcttggtctcgttccgggtgaggtcgaggtcgtcgccgacggggcgggactgggtgtcgcgaccctcgccggtgactccctcggcgagcggcatggcctaccggtgatacccgcgggcagtgcggcgcgatgccggccagcgttagcaccgtgctcgtggacacgagcgtcgcggtcgcaccggtggtcgccgatcacgaccaccacgaagatacctttcaagcgctacgtggccgcaccctcggtctggccgggcacgcggcttttgaacgcaggacgctggcgaccgtggcgaagctgcttg

SEQ ID NO: 1126 - DNA, 401 bp, Mycobacterium tuberculosis H37Rv
ttagggtgaccacggcaagcgtgacccgccggcgactgcagcgaagccgggtctgttggtgacagtgtgtatgtcggggtttcaggcggcaggttcgagggtgacccccaatccttgggcttcgagtttggcgacgaggcgacgtcgttctttgtcgggatccatgcgggtggtgaagtagtcggcgccgagatcctggtgaggccggccggtggccagcacgtgccaaatgatgacgatcagcttgtgggcgacggtggtgatcgccttcttgttggcagcgggactgcggaagccaccgaacttgcggacctggcgacggtagtactcgcgcaggtagccatcggtgcgcacggcggcccacgcgcactcgaccaggaccggctgcaggtgctggttgc

SEQ ID NO: 1127 - DNA, 401 bp, Mycobacterium tuberculosis H37Rv
ggtgacagtgtgtatgtcggggtttcaggcggcaggttcgagggtgacccccaatccttgggcttcgagtttggcgacgaggcgacgtcgttctttgtcgggatccatgcgggtggtgaagtagtcggcgccgagatcctggtgaggccggccggtggccagcacgtgccaaatgatgacgatcagcttgtgggcgacggtggtgatcgccttcttgttggcagcgggactgcggaagccaccgaacttgcggacctggcgacggtagtactcgcgcaggtagccatcggtgcgcacggcggcccacgcgcactcgaccaggaccggctgcaggtgctggttgcctgtgcggcgggcaccgtgatggcgtttgccggccgattcgtggttgcccgggcaca

SEQ ID NO: 1128 - DNA, 401 bp, Mycobacterium tuberculosis H37Rv
tgacagtgtgtatgtcggggtttcaggcggcaggttcgagggtgacccccaatccttgggcttcgagtttggcgacgaggcgacgtcgttctttgtcgggatccatgcgggtggtgaagtagtcggcgccgagatcctggtgaggccggccggtggccagcacgtgccaaatgatgacgatcagcttgtgggcgacggtggtgatcgccttcttgttggcagcgggactgcggaagccaccgaacttgcggacctggcgacggtagtactcgcgcaggtagccatcggtgcgcacggcggcccacgcgcactcgaccaggaccggctgcaggtgctggttgcctgtgcggcgggcaccgtgatggcgtttgccggccgattcgtggttgcccgggcacagc

SEQ ID NO: 1129 - DNA, 401 bp, Mycobacterium tuberculosis H37Rv
cactagttcaacctgagctctccggtggcccgttgctggtcggattggtgcttgagaaccacgccgagcgtggcggcaacgaccgcatcgtcgatggtgtccagtcccagtgccaagacggtgcgaccccagtcgatggtctcggcgatcgatggcaccttcttaagctgcatgccgcgcagcacgccgatgatgcgcactaactcctcggcgaagtgctcgggcagctcgggaactcgggataacaggatgcgacgctccagctcgggggtcgggaagtcgatgtgcaagtacaggcagcgacgcttgagcgcctcggacagctcacgggtggcgttggaggtcagcagcacgaacggcgcccgggtggcggtcagggtgcccagttcggggacggtcac

SEQ ID NO: 1130 - DNA, 401 bp, Mycobacterium tuberculosis H37Rv
ggtcagcagcacgaacggcgcccgggtggcggtcagggtgcccagttcggggacggtcaccgcgaagtcggacagcacctccagcagcaggccctcgatctcgatgtcggccttgtcggtttcatcgatcagcagcacggtgggctcggtgcgccggatagcggtcagcagcggacgctgcagcaggaactcttcgctgaacacatcggttttggtggcctcccaatctcccgagccggcctggatacgcaggatctgcttagcgtggttccactcatacagggcgcgagcctcgtcgacgccctcgtagcactgcagccggaccagaccggatccagtggcctgcgccacggcgcgcgccagctcggtcttgccgaccccggcggggccttccaccagca

SEQ ID NO: 1131 - DNA, 401 bp, Mycobacterium tuberculosis H37Rv
ccgataatcccggcaagacgctggtaggacttctcgcggccgccgaaagagctaaacaccaaaccgattcgtcgcgccgggcaggggcgacgaatcgggcgagttccagccggcttcgcgtggtctcgacggcggccgcggtctgcggaatcagtgtcacccccagcccgccggtcacgcactgcacgacggtggccagccacaccgcccgggtgttgggcagcatcgagcgtctggtcgcgtaggcagtgcccctcatgcagtcacaacaaagtcagctctgacagcgcggtcagcggcacccgctgcttgccggaaagacatgccctgggggtgcaccgagaccggcttccgaccaccgctcgccgcaacgtcgactggctcatatcgagaatgcttgc

SEQ ID NO: 1132 - DNA, 401 bp, Mycobacterium tuberculosis H37Rv
cgtgatcaccctgggtgtgcgcggtgcccggtacgtcggcgcggacggggtgttcgaggtacccgccccaacggtaacgccagtggataccgccggcgccggcgacgtatttgccggggtccttgctgcgaattggccgcgcaacccaggttcgccggccgagcgactgcgcgcattgcggcgggcctgcgctgcgggtgcgctggcaactttggtgtccggtgtcggcgactgcgcaccggccgccgccgcgatcgatgcggccctgcgagccaaccgccacaacggttcatgaccactgctacgcaccgaaggagacccgctgatgcgaacgaccaccgcggccgacttagcgctggcactcttcgcggttttcagtgtggtcggattcggctgacgca

SEQ ID NO: 1133 - DNA, 401 bp, Mycobacterium tuberculosis H37Rv
ggagtaaaagttcatcgtcctttcattgtcgcccagcgacgtcagaacgcccgaatcacccgccgagtatccacgctcgacaccgtggaatcccccgcgctgctggcagatggcggcattgaccggcgtggggatgctaccgactgggccgctgccgaccctgggccctgattggccgccgagcagtcccatgacgatccgctagttcacctcggatacccgctcggccgcaatgcgcagctagcggccatgttgatcgaaatcatttggggtacaccgcatctcggagcaatatggtagctaaacttgcttagcttgcttcgccgacaccgcgaccagatcgtcggcgtgcaccaccgggcggcgcagctcgccgggtagctcagaggtggaccggccca

SEQ ID NO: 1134 - DNA, 401 bp, Mycobacterium tuberculosis H37Rv
aactggtcaagggtacgtgacctgcaactacggggtcaaaccagcggggcctcagcgagatcgacgccagcacacgaaagtgcgccggtagcgtcgatctcgacgctaccggcgcactccggggcccgggtggtgacgtcatccgggttggaccgctgatggctgcggctaacatcgtgccgaatcgcgtccgatgtcgatctggaggaaccgccgatgaccgcccccttggatcgtgcgccggtcacggatttgccggctaacaacaaaggccgagaccgcacccactggctgtatctcgcggtcattttcgcagtgatagccggtgtgatcgtggggctgacggcgccgtcgaccggaaaaagcctcacggtgctcgggacggtgttcgtcaacctgat

SEQ ID NO: 1135 - DNA, 401 bp, Mycobacterium tuberculosis H37Rv
tcgtcgtcggaggtggtgctgcccagactgatcaccaagatgaaacacttgggcgtgcaatccagcacggtcggcgtggtggtgccgaccggctactcgttcaatcttgacggcaccgctatctatctgaccatggcgtcgctgttcatcgccgacgcgatgggacatcgcttgacatggggcgagcagatcgcgctgctggcgttcatgatcatcgcgtccaagggcgctgccggggtcagcggtgcgggccttgcgacgctggccggcggcctgcaggctcatcgccccgagctgctggacggtgtcgggctgattgtggggatcgaccggttcatgtcggaagcccgttcgctcacgaacttctccggcaacgccgtcgcaaccatcctggttgcctc

SEQ ID NO: 1136 - DNA, 401 bp, Mycobacterium tuberculosis H37Rv
gccgcgtggtatagggcgtacacgctcagatcagatgggacggagtcgaatccgcaggcgtgcacgatgcgtgcaccggtgtcggcggcctgcttgtggtacaagtcgatgctgttgcgcatgaacatcggctcgccggtcaggtcggcgtagtcggtgccggcggcagcgcatgcggccaccagcggcagcccgtagcgggtgtagggcccaacggtggtgaccacgacctgggcgcgggcggccatggcttgcagcgtcgacggcaacgacgcgtcggcggtcaggatcggccaggtctgcgcggattcgcccagggcttcgcgaacggcgagcacccgttgcgtcgacctgccggccagcgcgatccgggcatctcccccggcccgggccaggtattc

SEQ ID NO: 1137 - DNA, 401 bp, Mycobacterium tuberculosis H37Rv
ttcgagggtgctgcgtgggacgtgccgtctcggtccggcacggcagcggagcgcttgatctgcccggcgcggctgctagccgccgcctgcgggtcggccaaccgattcagccgtccccggctccgctcgcacgcgggtccgtagattcaattgttgagatttcttgctgcccgtctgccgggccaaggggaccgtacgataacgatttggattcgtcatctccggcaaaccgagatatcagttcaatcacaagccgatcacggcgcggtggcacaattgttgttgcaggtcagaagtgcggttttggctcagctgtatctttgcgaccgcggcgctatcgtgagccgaatcacgcaaatattgtgaccccggacacggatttgtcaccatcgtggccctgg

SEQ ID NO: 1138 - DNA, 401 bp, Mycobacterium tuberculosis H37Rv
cagtctgccgtaacagccggatcctctaccgtcagcagactcaaatgtcctccaccccaacgcaatacgtgatcaaccgcgcaccagagacgccaactgtagtcaaggcagtactagaagcggcggccatggccaatgttaataacgtcttcattgaaaacaagacgagaatatctcgaaaggccaccagaaaattaatacggaatagtattagcgtccgggctgcatcggtgcgtgcaagcctgcggccgaattgacgttggtcagcggtcgggaatccgccatcacgatccgcagtgcatccgaagcgtcgaccagggcgctcatctttcgctcgccggcaccgaccaacgtgtcgacgcggtcggccagatccgtccgatacaccgcggccaggtagt

SEQ ID NO: 1139 - DNA, 401 bp, Mycobacterium tuberculosis H37Rv
attgccacgactgccagctaccaggcctcgttcgagggcttcgcggcgcgcggcataggtcatgacgacgccaccgtgctgctgcgccgcagcgtcgaactcgcccaggctgcgcgcgacgaggtcggcgttggcggtctatcggtcgcagcctcggtcgggccatacggcgccgcgctggctgacggatccgaataccgcggatactacggcctgtccgtcgcagccttgatgaagtggcatctgccacggctcgaggtgctagtcgatgccggcgctgacatgctcgccctggaaaccatccccgatatcgacgaagccgaagcgctggtcaacctggtgcggcggttggctacgccggcctggctcagctacacgatcaacgggacgcggactcgcgc

SEQ ID NO: 1140 - DNA, 401 bp, Mycobacterium tuberculosis H37Rv
gcacccgacaccgtggagggcgattcccacactgcaatgacaccgcgccagcggctgaccgtgttggcaacggggctgggcatcttcatggtgttcgtggacgtcaacatcgtcaatgtcgcattgcccagcatccaaaaggtgtttcacacgggcgaacaaggtctgcagtgggcggtcgccgggtacagcctgggcatggcggccgtgctgatgagttgcgccctgctgggcgatcgctacggtcgcaggcgcagttttgtgttcggggtcacgctcttcgtcgtgagctctattgtctgtgtgctaccggtcagcctggcagttttcacggtcgcacgagtgatccaaggtttaggagcggcgttcatctcagtgctctcgctggccttgctaagcca

SEQ ID NO: 1141 - DNA, 401 bp, Mycobacterium tuberculosis H37Rv
cctcagcggctgcgttcggtatgtcctctccgtcgaccgtggcagacaagtcgatcgagacgacgtcgccgacggccaccggccggtccaccgcggtcagggtgccgaaccgggtacgtaacgactgcagttcggcgtcgacgtcgtcctcaccgatttcgatcggatccaccgagaccgtcagcgcgctcaggtccgggggactgatcttcgggcggatgtcgacctcggcggtgaattgcaggtcctggccgtactccttcttggtcacctcgatgttgggccggccgagcggttggacatccgactcggccaccgcctgtccgtaccggctgggcagcgcatcgttgacgatttgatccagcatggcctcccggccgatgcgggcttcgagtagtttg

SEQ ID NO: 1142 - DNA, 401 bp, Mycobacterium tuberculosis H37Rv
atgcagcgtatgcccctcaggcacgggagtcaggccggagcgccgggcaccggcggcgcttcgtgggtccgttcgtactcggcgagaatgtcgatacgccgttggtggcgttgcgctttcgaccacggcgtggtgacgaaggcgtcgactatcgccagtgcctcggccaccgtgtgcatgcggccgccgatgccgatcaattgggcgttgttgtgctcgcgagccagcgccgcggtctgcacactccaggccagcgcgcagcgagcgccgggcaccttgttggcggcgatctgctccccgttgcccgatccgcccagcacgatgcccaggctgcccggatcggcgacagtgcgcgtcgctgcggcaatgcagaatgccgggtagtcgtcgtcggcgtcgta

SEQ ID NO: 1143 - DNA, 401 bp, Mycobacterium tuberculosis H37Rv
gcagttctcccaggagtgggcaccgccccggctgcggggtaccacgtggtcgacggtgtcggccttgccgccgcagtaggcacaacagaaccggtcccgatgcatgagcgcggcccgggtcatcggaacccgggcacggtagggaacccggacataggagcgcaactggatcaccgacgggaccaggatcgatctggtcgccgagtggatgaccggcccggacgggtcttcgtgcaccacgtcggccttgccacagatcaccatgacaatcgcccgccgcatcgacaacgcggtaagcggctcgtaggtggagttcaggagcagcacccgccggcggttccagatcgatgcgctctcgtgacggttcggtggatgggtctcgacgcctgacgcgagtcggt

SEQ ID NO: 1144 - DNA, 401 bp, Mycobacterium tuberculosis H37Rv
cggcccggacgggtcttcgtgcaccacgtcggccttgccacagatcaccatgacaatcgcccgccgcatcgacaacgcggtaagcggctcgtaggtggagttcaggagcagcacccgccggcggttccagatcgatgcgctctcgtgacggttcggtggatgggtctcgacgcctgacgcgagtcggtgggagtggacactgtgcaggcatgaagcgggcccggttacgcctgccgcgacaccggaactgcggtggccgcggcgcttcttgccgtgcgccataggtcctccgccgaacagtccaccatgattcgcggctaatcgcacgccaaatgccacgtccacaccgtgtcgctccggtgaacaaaccgggggctggctggtcggccacgacaaataga

SEQ ID NO: 1145 - DNA, 401 bp, Mycobacterium tuberculosis H37Rv
cgcgctggctgacctcccgggtagcccggcgcgggatcgctatttctttcgcgacgggcggggccccgacgggtcgctgccgccgaacaactgggagtcggtgttcggcgggccggcctggacccgagtgcgcgaaccggacggcaacccgggccagtggtacctgcaccttttcgacaccgaacagccggacctgaactgggacaacccggaaatccttgacgacttcgagaaaacactgcgcttctggctggaccgcggcgtggatggcttccgcatcgacgtggcgcacggcatggccaagcccccgggcctgccggactcaccggacctgggcatcgaggtgctgcaccaccgcgatgacgacccgcgcttcaaccacccgaatgtgcacgcgattc

SEQ ID NO: 1146 - DNA, 401 bp, Mycobacterium tuberculosis H37Rv
acgtcgactggctggccgcgcccgacgatgcgctgatattccggcgtcacggcgggggtttggtgtgcgcgctcaacgccgctgagcgtccgctggcgctgccggcaggtgaacccatcctggccagcgcaccgttgaccgacgccacgttgccacccaatgccgcggcctggctggtgtagcggcattccgagctatgcctgcccgacatataagcgcatacgcatcctaggcgggcaccgtctaggtatgatgatgcggatcgccgtgcggctacccggggaagtcatcaccttcgtcgatagcgaggtcagccaaatccgcatacccagccggcgcgccgcagtggtgttgcgtgcctcgaacgcgagcgacgccgcgattcttaccgccaccgaacc

SEQ ID NO: 1147 - DNA, 401 bp, Mycobacterium tuberculosis H37Rv
cggagtccatcgagtaaccgggatcgacatagcccgaggcatccgttgtggccagaccgtgcgcgagtgaccgtgcggccaccgacagatcgtcgggtcgcaccttgccggccaccacccgactggccagcacgtcgaagcccgttgctacccaagccgatagcaatccggtagaccgcgcgcgaatacggataacggcggcatcgtcgagccgaagcgcgtgatccacgaacgtggccagatccgcgcggtgagccgggtcagggagccacaacccacgctcaaccaccccgcctatccccgaaaccaccgttgcaggtactcgcgatggtgtggcgatagtcgaaccaaccgctgttcctcgatatggaacgcggccagctgcgactcggcgatgaccg

SEQ ID NO: 1148 - DNA, 401 bp, Mycobacterium tuberculosis H37Rv
ggtttttgctggtccggtcccttaaacccgaatgccgacacgtaggcccgtgacggcacttcggtttgaccgacctggatatagtccagaccgtccgagacaacctcccagacggtcttccgcggatcgatgccagcacgggcctggtccacgtaactcagcttgacggtctcgccgaccttgacgctgccgctgtccggtgtctcgagcccgacgatggttttgaacagtgtggtcttgcctaccccgttgggcccaatgacgccgacgatgccattgcggggcaagctgaacgacaggtccttgatcagggcgcgcccgtcgtagcccttatcgaggtggtcgacctcaaccaccacgttgcctaggcggggcccgaccgggatctgaatctcctcgaa

SEQ ID NO: 1149 - DNA, 401 bp, Mycobacterium tuberculosis H37Rv
agtcttggtgccaggccatctcttgggcgatgttggcccgaaacgccgtggaatccgcgaaatagaagtcgaacttcagcagatcccgcaaccgcatcgcctgggcccagaacgcggcgacgcggtcaccttcggcgtgcttggcatgggccagcgcgagctcgacgatcgaggtctccaaaaacgcatggatcaccgagttccggtagaacgccgcggcgtgctcgtcgtcaggcgctatgtaccataccggctcccggccactgtcgacccgagtgaccgggtggccgttggacaacgcgtccgccgccgcacggacgccttcgcgcgagcgcagtcgcaatgcgcttgtcgaaaccggcgattgtttgcgttccagatagtccagtgagtcctgcaac

SEQ ID NO: 1150 - DNA, 401 bp, Mycobacterium tuberculosis H37Rv
gcgactgttgaacttcaagatcggccagccccgtcgcttggcgaccgcggccatctttccttccggattggtcggtcgcggattgcccaccagatacatcagggcgacgtcctcgtcaccgtcggcatagaagtaactgtctttgagatcgatgtcgtgctcggccgcaaagcgttgcaccgcagtggctttgcccggacaccacaaaattggcttcagcacacccccggtgagtatcccgtcctcgttggtctcgaacttgttggtgagcatgttgttgatccccagaaaacgtgcgactgggccaacttggatggtcagcgccgacgagctgaggaccacggtgtggccgcgggccacgtgagcccggaccagttcccgcatttccgggtagatccggg

SEQ ID NO: 1151 - DNA, 401 bp, Mycobacterium tuberculosis H37Rv
aaaaacgcaccgaccttcgggccggcaggactggccagaatctcggctaccgaaccgggtaggcgcaaatccggcgccgacttccgcgtcgcccgctcttccccctgctcgtcagcggcgctcatgagcccgacaccgatcgaggcactgaaccggctccttgagtatcgaacgacgccggcagcacacgcggtgccggaccaccggccagcgcaaggatttcgtcgaaacccgcctgcaggcattgagcgaacaactcgtcgtttcgcaccgacgccctgtcgtagcgcaccgtgacggtgcaccacccgccccgggaaattagcactaccatcatcgccacaccgggcaacggtccaataccgtactgccgcagtatcttcgcgccggcaaggtaggta

SEQ ID NO: 1152 - DNA, 401 bp, Mycobacterium tuberculosis H37Rv
atcttcgcgccggcaaggtaggtatcccctgggtagaccggaacattgctggcttgcacatcggaaccgatcaccgaaccggtgatcccctccagcacggccgtcggcaagacactcagcaccggtgcaatggaaccgatgatgttcatcgcgggctcgtcgcgacgctgggtcatctgcgcccggatcttcttcatccgagccaccggatcgatagtgcccaccggcgccgccaggttgacaccggtgaactggttgccgccggccgcatcgccctcggcccgcaggttgaccggcaccgccatcggcagcgtgctgatcggcacgcccagggcctcgtggtagcggcgcagcgcgccacacagacccgcaaggtaggcgtcgttgatcgacccgccgcc

SEQ ID NO: 1153 - DNA, 401 bp, Mycobacterium tuberculosis H37Rv
ttggtgaggccccccgcgcctgcctcaccgccgctaccgcccgcgccaccggcaccgcctgcgccgcccgcgccaccgataccgtcagcgccgctgactcctgcggcaccgctgaggaaccctccggacccacccgcaccgccggcaataccgccagcgccaccgttaccgccgtttgcgccgttgcccccgttgccgcccgtcccgccggccccgccgatggagttctcatcgccaaaagtactggcgttgccaccggagccgccgttgccgccgtcaccgccagccccgccgactccaccggccccaccgactccgccgctgccaccgttgccgccgttgccgatcaacatgccgctggcgccacccttgccacccacgccaccggctccgcccacccc

SEQ ID NO: 1154 - DNA, 401 bp, Mycobacterium tuberculosis H37Rv
ttcccccgggcccccccgtggcgccgtcaccaccgataccacccgcgccaccggcgccaccgttgccgccatcaccgaatagcaacccgccggcgccaccattgccgccagctccccctgcgccaccgtcggcgccggaggcggcactggcagccccgttaccaccgaaaccgccgctaccaccggtagaggtggcagtggcgatgtgtacgaaagcgccgcctccggcgccgccgctaccacccccactgccggcggctacaccgtcggacccgttgccaccatcaccgccaaaggcgctcgcaatgtcgccctgcgcgactccgccgtcgccgccgttgccgccgccgccaccggcagcggcggtaccgccgtcaccaccggcaccgccggtggccttg

SEQ ID NO: 1155 - DNA, 401 bp, Mycobacterium tuberculosis H37Rv
taccacccgcgccaccggcgccaccgttgccgccatcaccgaatagcaacccgccggcgccaccattgccgccagctccccctgcgccaccgtcggcgccggaggcggcactggcagccccgttaccaccgaaaccgccgctaccaccggtagaggtggcagtggcgatgtgtacgaaagcgccgcctccggcgccgccgctaccacccccactgccggcggctacaccgtcggacccgttgccaccatcaccgccaaaggcgctcgcaatgtcgccctgcgcgactccgccgtcgccgccgttgccgccgccgccaccggcagcggcggtaccgccgtcaccaccggcaccgccggtggccttgcccgagcctgccgtcgcggtggcaccgtcgccgccg

SEQ ID NO: 1156 - DNA, 401 bp, Mycobacterium tuberculosis H37Rv
acccgcgccgccggccccaccggccccgccgttacctccatcctcaccgggggtaccggatgaacccaggaagatcgccgtcatatcggcatagccggcacccgcggctccgtcaccgccatgaccgccggccccaccgtcaccgaccaacccgccgttgccaccggcaccgccgttaccgccatgaccgccggcgaccggtgcgtgggcgccattgccacctttgccgccgttgccgccgctgaccggcccgtcgttgccggccgccagaccattggcccccgcgcgagcaccggcgccgcccgacgcccccccggctccgccagccccacccaggcccgggtcgccaccgtgaccgccggccccgccgtcaccggcggccagccaactgccaccgttgc

SEQ ID NO: 1157 - DNA, 401 bp, Mycobacterium tuberculosis H37Rv
taggataattaacgagttcggagtacagatctacggggccacgataggtgacacctgggccgggctggtcagggcggtgcttgaccttgggtctcagtgttttgacgaagaccgagagcgtatagcgctgtccaacgtccgcatcaagtcttcggtgcagaattatcccgatctcactattgaagaacattgcaacagcgcccaactaaaggccatgctagatttcatgttcaacaccgataccatggaggatatcgatgtggtcaagagcttcagtcgtggcgcaaaaagctaccatcgccggataaaagaaggacgaatgattgagttcgtaattgagcgactgagtctaattccggaaagcaagaaagcagtggtcgtgttcccgacttacgaggatt

SEQ ID NO: 1158 - DNA, 401 bp, Mycobacterium tuberculosis H37Rv
gtcggtcaccaccggcaccagcaatccacgctcagtggccgcgccgaaccccagatgcacaccgcgatgcacgtgtacttgcgggccttcgcccgagtcgacccacgtcgagttgagaattacgttgtgtttcaatgcaataaccagcagccgcagcgtcagcgcgaacggtgtaatctcgggcgccgccgaaacgaaccggtcgcgcagccgcagcagttcggcgcaaattacctcaacgctggcctttgcggtcggaatctccttgtgggacaacgtcattttttcggccatccgcgcgtgcacgccgtggaccggccgcacgtccggcccggctccgacgccgcctcgagcagcggccagcacatcggcccgggtgatcacaccgccggcgcccgacc

SEQ ID NO: 1159 - DNA, 401 bp, Mycobacterium tuberculosis H37Rv
gtcgaagtccagcggcgccaacgaccgcagatcgataacctccagactccaatcatgttgctgctctgcagtatccgcgctagacagggcggtgctcaccaggtttccgtacgttaccacggtcacatcggtgccggaccggcgcaccatcgcgtgcccgatcggcggttccggccggctagtgtcgaccatcccgcggccgtggtagcggcgtttgggctccagatacatcacggggtccgggcaggcgatagcgtgccgcagcagccagtaagcgtcaccgggtgtcgacggcaccaccaccttgaggcccgcggtgtgcacccagtaggactccgtggagtccgaatgatgttcggccgcaccgataccgccaaacgaggggatccggacggtcaccg

SEQ ID NO: 1160 - DNA, 401 bp, Mycobacterium tuberculosis H37Rv
ctcgggtgaatgcacacggtcacgtcaaagcccaccgccgcggcgtctctggcctcttcctgcaagccctcgacatcgaggatatccagatgtacggcatcgagcgcgagacggccgaacgcggacgcggcgagcaggatggtcgagcggacatgtcgggccacgtcacgataggcaccgtcggcccgccggctcgagctaccgccaagggtggcgatcaagtcttcggcaccccacatcattcccacggtgggatcggccgcggcgatttcggcggcgcacacggcaccgcgcgcggtctccaccagcgcgatgacatcacgcggcgcaagctcgatgacttgggccgccgattcggccttgggcagcatcaccgtggtataggcggtgcctgcgagggc

SEQ ID NO: 1161 - DNA, 401 bp, Mycobacterium tuberculosis H37Rv
gatccgccgatcaccacggtcaacttgggcacccgcgcgcaggccaccgcggtgaccatcttggcgccatgcttggcgattccgccggcctcgtagtcgcggccgaccatgaagccggcgatgttctgcaggaacagcagcggaatcttgcgtttgtcgcacagctcgatgaaatgcgctcccttgagcgcggattcgctgaacaacacgccgttgttggcgacgatcccgaccgggtggccgtggacgcgtgcaaacgcagtcaccagagtcttgccgtatttagccttgaactcgctgaattcgctgccgtcaacaatccgcacgacgacctcatgaacgtcgtaagggacccggggatccgggggcaccacatcgtagagctcggcctgcgggtactt

SEQ ID NO: 1162 - DNA, 401 bp, Mycobacterium tuberculosis H37Rv
gaaggcgccgccggagtcgaccagatagatgcacggcagcatattctgcagcgcgacctcctgggcgcgcaggtgcttcttgaccgtcatcgggtagtaggtaccgcccttgaccgtcgcgtcgttggcgacgatcacgcactggcgtccggatacccggccgatcccggtgatgattcccgcgcccggggattcgtcgccgtacatgccgccagcggccagcggagccagctcgaggaaagggctgcccgggtcgagcaggcggtccacccgttcgcggggcaacagcttgccgcggctgacgtggcgtttccgggcgcgttcgttgccgcccagggcggcggcggcgagcttattgttcaattccgccaccagccggcggtgctcgtcggcgaacgagg

SEQ ID NO: 1163 - DNA, 401 bp, Mycobacterium tuberculosis H37Rv
ttcgccgccggctcagccgtgctgctcgtcgtcgcgttggtcatcgcactggttatcgccaacggctcggtcaaaaagcaaaccgcgatcgagccgttaccccccatgcccgggcctagcccgacacgtccgaccacgaccacaccgaccccaccctcacccagcgccgcaccggcaccgacaactacgaccggtacgcccagtgagacggtcgccggcgcgatgcaaaccgttgtctacgacgtcacgggggaaggccgggcaatcagcatcacgtacatggatagcggcaacgtcatacagaccgagttcaacgtcgccctgccgtggcggaaagaggtcagcctgtcaaagtcgtccttgcatcccgctagcgtcacgatcgtcaacatcggccacaa

SEQ ID NO: 1164 - DNA, 401 bp, Mycobacterium tuberculosis H37Rv
gcctccgaagcgtcactggtcgagaagctggtgccggacttcctgtggatctcgacggagcacaccgcccgggtatcgctgaatgccttggagcgcaacaagatgcgcgtcgttccgggtctgacgtcaaaggcgatgtcggtggccagccaatacgctccgcgcgccatcgtggcgccaatcgtgggtgccttttacaagaggcttgggggcagctaggcatcacttccggcggcggcgcccggtgccgaagatgctgcgggtgatctcgcgtgcggtggtgttgaggacgctcttgacggtcggattcttgagtatctcctcccacaccgcggggccctgcggctccaccggagcgggcatcggcggaacttcaaaatcgtccggccagggcagcggat

SEQ ID NO: 1165 - DNA, 401 bp, Mycobacterium tuberculosis H37Rv
ccgaaacagatcacgccgtccgttcaggatggcgctggtatcgaaggaatagagcacagcggttagaccacgctccgcagttcggctgactcagccaacttcggaatctggctgaccttggcgtcgaggtagatcgcagcggtgttgctgtcgatgacgcggcggcggtgggcgtcggtcaccgcccgcacgtagcccttaccgaggtctcggacggtattgcggtaccagttgccgcccccagccgatcgagcccgttcggcctcgtcctcgtgagccgcgatgaactcggcgcggcgctgtcggtagacctcgaccggcacgattccaagcgtgcttagccgccgcaggaacgcctcggcactcacgccaaaatgcgccgcgaccggccgcagcgattc

SEQ ID NO: 1166 - DNA, 401 bp, Mycobacterium tuberculosis H37Rv
gatgaccttgatcggtgcgggtccgcggccgctgccgcatgcgacggcaccgatcatcacggcggtcatcatcagcgcggttaaccaggctctccgaaccctggtcctacccgcctgagctgcaatccccacctttggcatgccttccctcacctcccccactgcgtcgtgaccgagctagactcggctgtagtctaggtcctgactggccgccacgctgcgatgctgataccaagttcagtgtgagatttcacgcgagagcgcaaggcctgttaatgtgccttggctaggtaatcgaggcgccgttagctcagttggtagagcagctgactcttaatcagcgggtccggggttcgaaaccctgacggcgcacaggtcaacgcgttatttcggatgcacca

SEQ ID NO: 1167 - DNA, 401 bp, Mycobacterium tuberculosis H37Rv
gggtgtgatcaatgcgcccaccgagttcatgttcggacgctcgctgatcggcgacggagctgacggcacggctgccagccccatcggcgagcccggcggaatcctgtacggcgacggcggaaacggctactcccagaccacgcccggagctgtcggcggagccggcgggtcggccggatttatcggtaacggtggcgccgggggcgccggcgggcccggcgccggcggcgggactggaggcctcggcggctggttatggggcaacaacggcgccgctggcaccggcgacccagttaacgttgccgtccccctgcgcgtggaaaacaactttccgctggtgaacctcttggtcaaccgcgggccaactgtccccatactgctggacacgggatcctcgagtc

SEQ ID NO: 1168 - DNA, 401 bp, Mycobacterium tuberculosis H37Rv
ggtgtgatcaatgcgcccaccgagttcatgttcggacgctcgctgatcggcgacggagctgacggcacggctgccagccccatcggcgagcccggcggaatcctgtacggcgacggcggaaacggctactcccagaccacgcccggagctgtcggcggagccggcgggtcggccggatttatcggtaacggtggcgccgggggcgccggcgggcccggcgccggcggcgggactggaggcctcggcggctggttatggggcaacaacggcgccgctggcaccggcgacccagttaacgttgccgtccccctgcgcgtggaaaacaactttccgctggtgaacctcttggtcaaccgcgggccaactgtccccatactgctggacacgggatcctcgagtct

SEQ ID NO: 1169 - DNA, 401 bp, Mycobacterium tuberculosis H37Rv
attttcgcgacaatctgggcgatttcaccactgccggcctcaacgtcgtcggtatctcccccgacaagccggagaagctcgctacgttccgcgatgcccagggcctgacgtttccgctgctgtctgatcccgaccgcgaggtgttgacggcctggggtgcctacggggagaagcagatgtatggcaagacggtgcagggggtgatccggtccaccttcgtcgtcgatgaagacggaaagatcgtcgtcgcgcagtacaacgtcaaggccaccggccacgtcgctaagcttcggcgcgacctgtcggtatagccgcgagcttggccagcagcagcgcttcggcggtcgccgcgcgttccagcacacccagatgcaggctttcattgacactgtgcgcctgcg

SEQ ID NO: 1170 - DNA, 401 bp, Mycobacterium tuberculosis H37Rv
gcccggggccgggatcgaggtgtgcacgccgtcgccgaacgactgcgcgaacgccaccaccgccagcaccggcagccccatccgcagcgccaggtccccgcgggccaacaggatcgtcccgccgccttgggcttcgacgaagcccagacggcggcggtcgttgggccgggaaaacttcgagtcgtggatgccgcggccgcacatcatggacgtgtcggcggtggcggccatgtcaccgaatccgatgatgccctccagcgtcaggtcatccaggccgccggccaccaccagttgagccttgcccaaccggatcttgtcgacaccttcctcgaccgacaccgcggcggtggcgcacgcggctaccgggtggatcatcgcaccgtagctaccgacgtaggact

SEQ ID NO: 1171 - DNA, 401 bp, Mycobacterium tuberculosis H37Rv
ccttccccgatggccagttcgacgtagcgccgcagccactgcaggtaggtcatgtcggcgacgtcgccgaagtagggcttggcggtcttggccatcgccgcgatgatctcgtcgcgacgctccgcgaccgcctccgcgtcaccggccacctcgtcgagcagccgcccgcaccgggatgcgctgttgtcgatctcgtggatatcggcaccgagctgactgcggctggaggccatgccgccctgcgcttttccggcgctgatccattggtcggtgccctgagtgtcgacgagcatccgcttgaccgatggcgacgtggtggattccttggtggccatcgccgcggtgccgaccaggatgccgtcgatcggcatcaatgggaagccgtaggcctgcgcccagcg

SEQ ID NO: 1172 - DNA, 401 bp, Mycobacterium tuberculosis H37Rv
atgaccgtaaagaggaccacgattgagctggacgaagatcttgtgcgggcagcccaggccgtcaccggggaaacattgcgagcgacggtcgagcgcgcgctgcagcagctggtggccgcggctgccgagcaggccgccgcgcgccggcggcggatcgtcgaccatctcgcgcacgccggcactcacgtggacgcagacgtgctgctctccgagcaggcgtggcgatgaccacctggattctggacaagagtgcccacgtgcgactcgtggccggcgccacgccgccagccggcatcgacctcaccgacctcgccatctgcgatatcggcgaacttgaatggctgtattcagcacggtcagctaccgactacgacagccaacaaacgtcactgcgcgcctat

SEQ ID NO: 1173 - DNA, 401 bp, Mycobacterium tuberculosis H37Rv
aactctctcgcgggcgctagcttcgcccgaatccgtgagcggaggcgataatccttacaggccatcaaaaaagtcctcgtcgagccgtaagagttcgacggtctgcaccgcctggacaccgactcgataccgcacgagcagctcggccagccgagcgccgtcgatgagttcgatccgggcgttgatccgctcagcttcctcgcgggcaccgcgggaaaacgatgacgtggtgatgtagacgccccggtcgccctgcttgcccaggagggcgccggcgaactcgtggatcttcggccggccaatcgtttggtcgacggcgtatcgcttggcctgcacgtagatgcggtccagcccgagcgggtcctggctgatgattccgtcgatgccagcgtcaccggagg

SEQ ID NO: 1174 - DNA, 401 bp, Mycobacterium tuberculosis H37Rv
gtcaaacgctgccgatcggccttgcctcgtcaggccgccgacagcaccgccctgggctcacggtccgcggctccgccgggatccgaccggcggcggctcaaccccctcgatcgtcttgagccggtcgacagaccgatcgaaagacggccaccggatcgtcccggcaggggcgaggaagtccggcgtccgagcaagcaccgggcgattgccctcaacgcggaagacaacccgatcacccgattgcaggccgagcgcgtcgcgcaccgctttcggaaccgtcacctgccccttcgacgtgacgatgggttcgtcggagtgcctgcttcaccgttgccgtacgccgcccgtaccctcacactctgtggagctgctcgtcgccgccaaccccgctgaagactcgc

SEQ ID NO: 1175 - DNA, 401 bp, Mycobacterium tuberculosis H37Rv
tcgaacagcgctgtgcggtcgccgtattcggacagcagtcgtacggccaacgacacttcctcggtaagccgcaccgtggaatgactatccagatgagcgcggaaagtcgccagattctgtgcccccggatacagccagtaccgctcataggcgccgatgcggtccatcagccgcttcgcccgagccacgtcgtgtgtggtgtcgagcccggcgaggtcgacctccgccaggtgacgacacgcgtcatcgagcaggttccaggtgtccaggcgggtgtaggacgggttggccaccgcggccagcgcggagacatgcagccgtcgcgggcggacgctgtttgggttcatgtcgtcacctgttctctggtgcgggtagcgccgtagagtgcaaccaggcaatta

SEQ ID NO: 1176 - DNA, 401 bp, Mycobacterium tuberculosis H37Rv
gcaaccggtccagcgtccagccccgcagatgcgcggtgatcaggtcgtcgatgtgggcggcgtgttcactgacccctcgagccaccgcggccgtgtacggatgtagccgggcaatgtcgggcttcgcttcggccagcgcggcacgggtgtcgaccacctcggccgcgctgatgccgcggacctcggcctcgaacagcagggccaccgcgcgcttacgggcctgatgtcgtccgcgaaccggctttctgtccgacatcgtcaggcgttgacccggcccaggtagctaccgtcgcgcgaatccacctttagtttgtctccggtattgatgaacagcggcacgttgatctgggctccggtctgaagggtggccggcttggtgcccgcgctggaccggtcgccct

SEQ ID NO: 1177 - DNA, 401 bp, Mycobacterium tuberculosis H37Rv
ccgacgaaggcatcgaccggatctgggcccggctgccggaggtgctcagcgacgtactcccggatcagcgccgccttcgacgtccgccgccgtcgcgcttcaacagcaagcgctcggtcaacgtcttcgtcgatgtagatctgcagccttttcacatggcaaatatacgccactagcataatgctgtatacatcggtagccgagaatcggatgcttgccgctggctgccgagtttgttgaactcgccgccgtggtgacctggatgaagtgtgcccgccgaaactgccgccgcccgactaggcgactggccaaagcgatgacagtgctgacttctgtacaggggcgaagcgagtgtccgcccctttacgcgcgtcgtaatcagccgctgagttcgccatggt

SEQ ID NO: 1178 - DNA, 401 bp, Mycobacterium tuberculosis H37Rv
atcaggatcgcggcggtgcggctgtggtctgcgatgatgcggtaccgcacgtcgtcttcgtggttgccgacgtcgtaggcacgcgcggcgaccctggccacggtatcgatgaccggcctgagcaggtcggtctcgtagacgttgtgcacgtcttgcagcaccagcgcgatccgctcgacgcccatgccggtgtcgatgttcttgcggggcagcggcccgaggatctggtagtcctccttggtggttccctctccgcgctcgttctgcatgaacaccaggttccagacctcgaggtagcggtcttcgctgacgatgggaccgcctgcgggaccgaattcgggtccgcggtcgtaatagatctccgatgacggcccgcacggtccgggaatgcccatcgacca

SEQ ID NO: 1179 - DNA, 401 bp, Mycobacterium tuberculosis H37Rv
cacgcagatgagccggcaccagaccggccttgccggccttgatgtcgttcatcgccgcggccaacgccgtggtgacggcgtttgacttcggtgcggtggccaggtggatggtggcgtgcgccagcgtcagctgggcttcgggcatgccgatcagcgccaccgtctgtgcggcggcgaccgccacctgcagcgcgctcgggccggccatgccgatgtcctcgctggccagaatcatcagccggcgggcgatgaaccgcgggtcctccccggcgaccagcatgcgggccaaatagtgcagcgcggcatcgacgtcggaaccgcgcaccgatttgatgaaggcgctgacgacgtcgtagtgctggtcgccgtcacggtcgtagcgcaccgcggctttgtccacc

SEQ ID NO: 1180 - DNA, 401 bp, Mycobacterium tuberculosis H37Rv
acaaaaggtgaagcgcaacgtcgaactcgctggcgttgatgtcatcctggtgcaccgcatgctgaaaaatgaggtgccagtgtcggaatatctattcatgaccgacgtcgtagcgcagtgcctcgacgagtcggtgcgaaaactagcgacgccgctgacacatgacttcgagggcatcggagaaacgtcgacacactacatcgacctcgccacgtccgacatgccgccggcggtgccagaccacagcttcttcggcctgctgtgggcggatgtgaagttcgaatggcacgcgttaccgtacctgttaggtttcaagaaggcctgtgcaggtttccgcagcctgggccgcggcgccaccgaagagcccgccgaaatgggctaatcgggttcgcttggctcga

SEQ ID NO: 1181 - DNA, 401 bp, Mycobacterium tuberculosis H37Rv
ctccaccgcaaacctgcgcgagcttcctcgcgttgcggccatcatcgagcccgacgtgtcgaagatcggagtgttgaacttcaagcagattgatgccgccctagaggctgggcggatggcagcccgtgcggctttgcaagcacagccggacctggtgcgctgaacccgaccaagtgccgctacggcccactcaggtgtccggcaccgggcgtacgcgctgcgccgggcggtccggtgtgatctcatcagcagctatgagcatcaaagttgcgctggagcaccgcaccagctacacctttgaccggctggtgcgggtgtatccgcacatcgtgcggctacgcccggcgccgcactcccgcacctccatcgaagcctactcgctgcgcatcgagcccgccgac

SEQ ID NO: 1182 - DNA, 401 bp, Mycobacterium tuberculosis H37Rv
caagtgccgctacggcccactcaggtgtccggcaccgggcgtacgcgctgcgccgggcggtccggtgtgatctcatcagcagctatgagcatcaaagttgcgctggagcaccgcaccagctacacctttgaccggctggtgcgggtgtatccgcacatcgtgcggctacgcccggcgccgcactcccgcacctccatcgaagcctactcgctgcgcatcgagcccgccgaccacttcatcaactggcagcaggacgcgctgggcaactttctggcgcggctggtctttccgaatcccatgcgccaactgcgtattaccgtcgggcttatcgccgacctcaaggtgatcaaccccttcgacttctttatcgaggactgggccgagatatggccctgcgcagg

SEQ ID NO: 1183 - DNA, 401 bp, Mycobacterium tuberculosis H37Rv
gagttcagacaccggatttcacgctgcgcaccggcgtcggctcgtgccgggactcggcgtggctgctggtctcgatcctgcgtcagttcgggctggccgcccggttcgtgtccggctacctggttcagctggcatccgacatcgaagcgctcgacgggccgtcggggcccgccgccgacttcaccgacctgcacgcgtgggccgaggcatacatcccgggtgccggctggatcgggctggacccgacgtcggggctgttggccggcgagggccacattccgctggcggctacgccccaccccgccagcgcggcacccatcagcggcggcaccgacgtgtgcgacaccgtgctggagttctccaacaccgtcacccgcgtacacgaagacccacgtgtcacg

SEQ ID NO: 1184 - DNA, 401 bp, Mycobacterium tuberculosis H37Rv
ccgatctgtacgaggaactggcgccgcgacccaccacaccgttcgcccaggcgctccggctggcactgattgacgcggcacccgatgtcgcccaagaccccgtcgtggtggtgctcagcccgggcatctattcagaaaccgctttcgaccaggcgtatctcgcaacgctgctgggtttcccgctagtggaaagcgcggacctggtggtgcgcgacggcaagctgtggatgcgttcgctgggcacgctgaaacgcgttgacgtcgttcttcgccgcgtcgatgcccactacgcggatccactggatctacgcgccgattccaggctcggtgtcgtcggtttggtggaagcgcagcaccgcggaacagtgaccgtcgtcaacacgctgggcagcggcatcctg

SEQ ID NO: 1185 - DNA, 401 bp, Mycobacterium tuberculosis H37Rv
tacgttgctgagcggtaatgggcgccggcgcgtcggtgagcggatcgacgccgccgccggtcttcgggaacgcgatcacctcacggatcgagtccatcccggccagcagcgcggtggtccggtcccacccgaacgcgattccgccgtgcggcggtgcgccaaacatgaacgcctccaacaggaatccgaacttttcctccgcctcggccttgtccaggcccatcaccgcgaacacccgttcctggatatcacggcggtggatacgcaccgagccgccaccgatctcgtggccgttgcagacgatgtcgtacgcgtcggccagcacgctgccggtatcggattcgatgcggtcctcccattccggtttcggcgcggtgaaggcatggtgcaccgcggtccag

SEQ ID NO: 1186 - DNA, 401 bp, Mycobacterium tuberculosis H37Rv
gtcgcggaacaccacctgtgcgatgcccgaagcgtcccgcagatcgatgaagatcacgccgccgtggtcgcggcggcgagccacccagccggccaatgtcacctgctgcccggcgtcgccttcccgtagcaaacccgcggcgtggctgcgcagcacaaacactccccttcaaccggattaaccgactgctcagtctagaggtgcccgcggcgcacatcggtcacgcaggataatttcggctcatctcaacaaacattgcaacaggcattgccctagtcggacccggtgccgtcggaacgacggtcgccgcgctgttgcacaaggccgggtattcgccgctgttgtgcggccacactccgcgcgccgggatcgagctccggcgagacggcgcagaccccatc

SEQ ID NO: 1187 - DNA, 401 bp, Mycobacterium tuberculosis H37Rv
aagcgtcccgcagatcgatgaagatcacgccgccgtggtcgcggcggcgagccacccagccggccaatgtcacctgctgcccggcgtcgccttcccgtagcaaacccgcggcgtggctgcgcagcacaaacactccccttcaaccggattaaccgactgctcagtctagaggtgcccgcggcgcacatcggtcacgcaggataatttcggctcatctcaacaaacattgcaacaggcattgccctagtcggacccggtgccgtcggaacgacggtcgccgcgctgttgcacaaggccgggtattcgccgctgttgtgcggccacactccgcgcgccgggatcgagctccggcgagacggcgcagaccccatcgtggtgcccggtccggtgcacaccagtcc

SEQ ID NO: 1188 - DNA, 401 bp, Mycobacterium tuberculosis H37Rv
ctcgatgacgacgtcgtcgacgaagtggtccgcctcgtccggtcggccccgcaggacatgggcacctcgatgctggccgaccgggcagcccaccggccactggaatgggatttgcgcaatggggtgatcgtccgcaaggcccgcgcccacggcctggccaccccgatcagcgacgtgctggtgccgctgctggcggctgccagcgacggtcccggatagcaatgtagctaatgtctagatcatgtacccctgcgagcgggtaggcctgagcttcaccgagaccgcgccttacctcttccgcaacaccgtcgacctggccatcacgcccgagcaactcttcgaagtgctcgccgacccgcaggcctggccacgctgggcaacggtgatcacaaaggtgacct

SEQ ID NO: 1189 - DNA, 401 bp, Mycobacterium tuberculosis H37Rv
ggttagccgccgtaggttcctgacgacgggcgcggcagcggttgttgggacaggtgtcggcgcgggcgggaccgcgctgctgtcgtcacacccccggggtcctgccgtctggtatcaacgtggtcggagcggcgcgcctccggtgggtggtctgcacctgcagttcggccggaatgccagcaccgaaatggtggtgtcctggcataccacggacaccgtcggcaatccgcgagtcatgctgggcacgccaacctctggcttcggcagcgtcgtggtggccgagacccggtcgtaccgggatgcgaagtccaataccgaggtgcgcgtcaaccacgctcacctgaccaacctgacacccgataccgactacgtctacgccgcggtgcacgacggtacaactc

SEQ ID NO: 1190 - DNA, 401 bp, Mycobacterium tuberculosis H37Rv
agggtgacgccatcgtctttcagcacggcaaccccacgtcgtcttacttgtggcgcaacatcatgccgcacttggaagggctgggccggctggtggcctgcgatctgatcgggatgggcgcgtcggacaagctcagcccatcgggacccgaccgctatagctatggcgagcaacgagactttttgttcgcgctctgggatgcgctcgacctcggcgaccacgtggtactggtgctgcacgactggggctcggcgctcggcttcgactgggctaaccagcatcgcgaccgagtgcaggggatcgcgttcatggaagcgatcgtcaccccgatgacgtgggcggactggccgccggccgtgcggggtgtgttccagggtttccgatcgcctcaaggcgagcca

SEQ ID NO: 1191 - DNA, 401 bp, Mycobacterium tuberculosis H37Rv
cgagtaccggagctggctcgaggaaaccgacatgccgaaactgttcatcaacgccgagcccggcgcgatcatcaccggccgcatccgtgactatgtcaggagctggcccaaccagaccgaaatcacagtgcccggcgtgcatttcgttcaggaggacagcccagaggaaatcggtgcggccatagcacagttcgtccggcggctccggtcggcggccggcgtctgaccgcaaccgggcctcatgctaggccaccggcgaccgacggacttcccgcgcgagccgctccaaaagcctcagccgctcggggtggtcggctcgtcaaacgacagccctatcagccgagacaccacgttgtgcagcgcgtcaaacacctccaggatctcttctcggctactcgaaa

SEQ ID NO: 1192 - DNA, 401 bp, Mycobacterium tuberculosis H37Rv
cgaacatgggccacttgacaccggtcgcggcgccccgattagcctgtgctttcgtgccgaccaatgctcagcgacgtgccacagccaaacgcaaactcgaacgacaactagagcgccgcgccaagcaagccaaacgccgtcgcatcttgactatcgtcggtggctcactcgcagcggtggccgtgatcgtcgcggtagtcgtcacggtggtggtcaacaaggacgaccaccagagcaccacgtcagcaacccccaccgactcggcctcgaccagccccccgcaggccgcgaccgctcccccgctgccgccgttcaagccgtcggccaacctcggcgccaactgccagtacccgccgtcgccggacaaggccgtcaaaccggtcaagttgccccggaccggc

SEQ ID NO: 1193 - DNA, 401 bp, Mycobacterium tuberculosis H37Rv
tcgtcacaggtcaccggcctgccgtcggaatagacggcgtcgtcggagatctggtagtcgaggatcaacggcgacccctccaccaccgagaccgttccgaagtcgcggtcagccaccacttggccgtcggggccgtgatagccaaacccggtgagagtccgggcgaatgcctgcgccccggccgacgcggcaccgatgacggtattggtgttgtaggtgaccagcgcgccgtcgaccacgtagtcgatctgagccgcggcgctgcccgaacacgcggtcagcgtggttgcggcgaccaacgtcgcggtaccaacgactcgcaggccggcgatgcgcgtatgacgccggcggcggggggccaccgcgcctaccgccgaccggcgttccgcttgccggtcgga

SEQ ID NO: 1194 - DNA, 401 bp, Mycobacterium tuberculosis H37Rv
tgacggtattggtgttgtaggtgaccagcgcgccgtcgaccacgtagtcgatctgagccgcggcgctgcccgaacacgcggtcagcgtggttgcggcgaccaacgtcgcggtaccaacgactcgcaggccggcgatgcgcgtatgacgccggcggcggggggccaccgcgcctaccgccgaccggcgttccgcttgccggtcggacgcctggtaccgacgggacgcactgggcgcgcccccggcgccggcttgctggagccctgggccgcccgcggggcggattggctgctggcctgcgtgatccccaccagcgactgttcatcagcggctgccggctgctcgccgccatccgtgctggcgtcctctgatcccgccggcgagccggagttacgccgtttga

SEQ ID NO: 1195 - DNA, 401 bp, Mycobacterium tuberculosis H37Rv
cggcgagccggagttacgccgtttgagcacccgacgggtgtggttgcgcaccaactccgtgcgctcacggagggtaaccaacagcggcgtggcgaagaagattgacgagtaggtgccgatgatgatgccgatcagctgcaccagcgccaggtctttgagagtgccgacgcccagcagccagaccgccaccaccatcagcgccaacaccggcaacacgccgatcaggctggtgttgatcgaccgcatgaacgtctggttgatcgccaggttggcctgctcggcgaaggtgcgccgggtggtgtgctggaagccatgggtgttctcctcgaccttgtcgaacacgatgacggtgtcatagagcgagaacccgagaatggtcagcaggccgatgaccgtggccg

SEQ ID NO: 1196 - DNA, 401 bp, Mycobacterium tuberculosis H37Rv
cctgctgcaccgctcccaggccgttgtatgccggcttggccagcagcgacgatttggacgccagatacaccaacggccacgtcaccaagaacaccacgacgaggtccaggatcgtggtgaggcccagggtgaacgcgaaccccttcacctgaccgatcgccagaaagtacagcacggcagcggccaggaaagtgacggcgttgcccgacacgatcgtcttgcgggcacgcgcccaaccgcgcggcactgccgaccggaacgaacggccttcgcggatctcgtctttgatgcgttcgaagaacaccacgaacgagtcggcggtggtcccgataccgatgatcaggcccgcaataccagccagatctagggtgtagttgatatatcggcccaagagcaccagg

SEQ ID NO: 1197 - DNA, 401 bp, Mycobacterium tuberculosis H37Rv
gatttacacctcgggtagtaccggcgcacccaaaggcgccatgtatcgcgagagccaggtgatgagcttctggcgcaagtcgagtggctggttcgagccgagcggttacccctcgatcacgctgaacttcatgccgatgagccacgtcgggggccgtcaggtgctctacgggacgctttccaacggcggtaccgcctacttcgtcgccaagagcgacctgtcgacgctgttcgaggacctcgccctggtgcggcccacagaattgtgcttcgtgccgcgcatctgggacatggtgttcgcagagttccacagcgaggtcgaccgccgcttggtggacggcgccgatcgagcggcgctggaagcgcaggtgaaggccgagctgcgggagaacgtgctcggcg

SEQ ID NO: 1198 - DNA, 401 bp, Mycobacterium tuberculosis H37Rv
tacggcaacagtgcccgggcctacccgctggcggtggttgtcccgtccggggacgcgctttctcgccatggcatcgagaatctcaagcccgtgatcagcgagtccctgcaggaggtagcgagggcggccggcctgcaatcctacgagattccacgcgacttcatcatcgaaaccacgccgttcaccctggagaacggcctgctcaccggcatccgcaagctggcacgcccgcagttgaagaagttctatggcgaacgtctcgagcggctctataccgagctggccgatagccaatccaacgagctgcgcgagctgcggcaaagcggtcccgatgcgccggtgcttccgacgctgtgccgtgccgcggctgcgttgctgggctctaccgctgcggatgtgcg

SEQ ID NO: 1199 - DNA, 401 bp, Mycobacterium tuberculosis H37Rv
ggacacatagcccggaccgttttgtcacctaccacgtgatgaacccctacgacgacggcatcgggctggacgagttcgtcgactggctcaactccccaactagcgggtccggttgcacgatccagcggatcgccgactacggcgagtggctgcagcggttcgagacttcgctgcgtgccttgccggatcgccagcgccacgcctcgctgctgcccttgctgcacaactaccgagagcctgcaaagccgatatgcgggtcaatcgcgcccaccgaccagttccgcgctgccgtccaagaagcgaaaatcggtccggacaaagacattccgcacctcacggcggcgatcatcgcgaagtacatcagcaacctgcgactgctcgggctgctgtgatcgggcctg

SEQ ID NO: 1200 - DNA, 401 bp, Mycobacterium tuberculosis H37Rv
agggcggctccggcggcctcggcggcttcggcgaaagtaccggcggcgacggcggcctgggcggcgccggcgctgtgctcatcggcacgggcgtcggcggtttcggcggcctcggtggcggctccaacggcaccgggggcgcgggcggcgcgggcggcacgggcgccacgctgatcggcctgggcgccggcggcggcggcggcatcggcgggttcgccgtcaacgtgggcaacggcgtcggcggtctgggcggccagggcggccagggcgccgcgctgatcggcctgggcgccggcggtgccggcggtgccggcggcgccacagtcgttggacttggtggcaatggcggtgacggcggtgacggtggcggcctgtttagtatcggcgtcggtggggacggc

SEQ ID NO: 1201 - DNA, 401 bp, Mycobacterium tuberculosis H37Rv
cggcgcgggcggcacgggcgccacgctgatcggcctgggcgccggcggcggcggcggcatcggcgggttcgccgtcaacgtgggcaacggcgtcggcggtctgggcggccagggcggccagggcgccgcgctgatcggcctgggcgccggcggtgccggcggtgccggcggcgccacagtcgttggacttggtggcaatggcggtgacggcggtgacggtggcggcctgtttagtatcggcgtcggtggggacggcggcaacgccggcaacggcgccatgcctgccaatggcggcaacggcggcaacgccggggtcattgccaacggctcctttgccccgtcgttcgtcggcttcggcggcaacggcggcaacggcgtcaatggcggcaccggcggcagcg

SEQ ID NO: 1202 - DNA, 401 bp, Mycobacterium tuberculosis H37Rv
ggcggcggcggcatcggcgggttcgccgtcaacgtgggcaacggcgtcggcggtctgggcggccagggcggccagggcgccgcgctgatcggcctgggcgccggcggtgccggcggtgccggcggcgccacagtcgttggacttggtggcaatggcggtgacggcggtgacggtggcggcctgtttagtatcggcgtcggtggggacggcggcaacgccggcaacggcgccatgcctgccaatggcggcaacggcggcaacgccggggtcattgccaacggctcctttgccccgtcgttcgtcggcttcggcggcaacggcggcaacggcgtcaatggcggcaccggcggcagcggcgggatcctttttggcgccaacggcgcgaacggaccgtcgtagcg

SEQ ID NO: 1203 - DNA, 401 bp, Mycobacterium tuberculosis H37Rv
ttgccggattcgcgacctggcacgaagggcacgaggccgccgtgcgcgcgctcaaccgtggcgtccatctgatcgcgcacgcggctgtggaaacctattcggtcttgacccggctaccaccgccgcatcgtattgcccctgttgccgtccacgcctacttggcggacatcacctccagcaactacctggcactggatgcctgctcatatcgcggcttgaccgaccacctcgccgagcacgatgtcaccggtggcgcaacctacgatgccctggtcggcttcacggcgaaagctgccggcgcaaagctgctgactcgcgacctgcgcgcggtcgaaacgtacgagcgattgcgggtcgaggttgagctggtgacctgagaaaccgttgccgttgagtgtgtt

SEQ ID NO: 1204 - DNA, 401 bp, Mycobacterium tuberculosis H37Rv
gcccacaccgacggcagcgcactgcagctcggcgtcctcggcgcgtcgcatgtcgtcaccgtcgagggacgcttctgcgaggaagtctcctgcgtggcccgcagccggggcggcgatctgcccgagtccacccacgcacccggctaccacctccaatcccataccgagacgcacgacgaggcggcgtttcggcgactcgcgcgccacctgcgtgaacgctgcacgcgggcaaccgggtggctgggcggtgtgtttcccggtgatgacgccgcgctgaccgcactcgccgccgaacccgatggaaccgggtggcgttggcggacttggcatctgtacccgagcgcgtccggcgggacggtggtccacacgacgagccgatggcgtccatgagccgcaaccgc

SEQ ID NO: 1205 - DNA, 401 bp, Mycobacterium tuberculosis H37Rv
gcacgcgggcaaccgggtggctgggcggtgtgtttcccggtgatgacgccgcgctgaccgcactcgccgccgaacccgatggaaccgggtggcgttggcggacttggcatctgtacccgagcgcgtccggcgggacggtggtccacacgacgagccgatggcgtccatgagccgcaaccgcctgttcctggttgccggcagcttggcggttgccgccgccgtgtccttgatctctggaatcacgctgctgaacagggacgttggctcgtatatcgcctcgcactatcgccaagaatcccgtgacgtgaacggaacgcgatacctgtgcaccggatcgcccaaacaggtggccaccacgctcgtcaagtaccagaccccggcggcgcgcgcgtcgcataccg

SEQ ID NO: 1206 - DNA, 401 bp, Mycobacterium tuberculosis H37Rv
gcggtcgcggcgtgcgcggcctgcggtctcgtttacgagctcgcgctgctgacactggcggcgagcctgaacggcggcgggatcgtggccacctccctgatcgtcgcgggctacatagccgcgctgggagcaggcgccttgctgatcaagccgctacttgcacacgcggccatcgcgttcatcgccgtggaggcggtgctgggcatcatcggcggattgtccgcggcggcgctgtatgcggcgttcgcgttcctggacgagctcgacgggtcgacgctggttcttgcggtgggcaccgccctgatcggcgggctggtcggcgccgaggtgccgctgctgatgacgctgttgcagcgcggccgcgtggcaggggccgccgatgccggacgcaccctggccaa

SEQ ID NO: 1207 - DNA, 401 bp, Mycobacterium tuberculosis H37Rv
gcacacgtcccactcgtcgaactgccggaacccggcatcatcgaaaaccttgatcgagttcaaccccggcaggccgtcgggcggcggcgccgctggcataacgtcttggtgggtaatgccctcctgttcggtctggaacgacgccgccatgctgaatatggtttccccgtgctggactgcgttgacccgcctggtgcagaacgatccaccgtcgcggatgcgttcgaccagaaaaaccgtgcgctccttggcatctccaggccgaagaaaatagccgtgcagcgagtgcaccatgtaccgcgggtcgacggtgcgcaccgccgacaccagcgactggccggctacatgaccaccgaaagtgcgttgcaggaagcccgattcggggctgaacacgcttcctc

SEQ ID NO: 1208 - DNA, 401 bp, Mycobacterium tuberculosis H37Rv
gcgacgccaacatcggcatcgggaatatcggcgacagaaacctcggcattgggaacaccggcaattggaatatcggcatcggcatcaccggcaacggacaaatcggcttcggcaagcctgccaaccccgacgtcttggtggtgggcaacggcggcccgggagtaaccgcgttggtcatgggcggcaccgacagcctactgccgctgcccaacatccccttactcgagtacgctgcgcggttcatcacccccgtgcatcccggatacaccgctacgttcctggaaacgccatcgcagtttttcccattcaccgggctgaatagcctgacctatgacgtctccgtggcccagggcgtaacgaatctgcacaccgcgatcatggcgcaactcgcggcgggaaac

SEQ ID NO: 1209 - DNA, 401 bp, Mycobacterium tuberculosis H37Rv
cgagtgaccggatgggttttcgatcaccggtgtgggcgatcggtaccgggcaggtgaccgggtgctttacggcggctcgatgagcccaaaggatgttgacgacctggctacccagcaggacgtcgacgacggacagtcgatagagcgtcgctggacggggagcggtcagcgacgctggcggcggtcgccgccgacgggccgctaccgtagcaactcgcaaatccaggtctggatttccggcgccggccggctccgttagccgtcggctccgttggtgccggccaggccgggtggccccaacagtgatgcaccgccgctgccgccgggcccgccgaagcctggagcgccattgaagaggctcccggcgccgccgtttccgccgtttccaccgttgccgatca

SEQ ID NO: 1210 - DNA, 401 bp, Mycobacterium tuberculosis H37Rv
cgctggccgatctgccgctgacctatccggaggtgggcgcgacagcgaccggacgactgcccgcgggctacaaccaccttgacgtgtcgacgcagatcggcaccggccgccagcgttttgagcaggccgccgacgccgtcatgcattggggcatgcagcgcaacgccggcctgcgggtgcgggccagctccgaaaccgccgtcgtgtccgcggtggtgttggtgggaatcgctttcctgcgtgcgccgtgccgagtggtgtatgtcatcgacgaacccgacgtgcgcggattcggttacggcactttgccgggccatccggtgtccggcgaggaacggttcgcggttcgctgcgacccgatgacctccgtggtgtttgccgaggtgttgtcgttctcccgt

SEQ ID NO: 1211 - DNA, 401 bp, Mycobacterium tuberculosis H37Rv
catgttccagtgctgcggatgggtcagcagattgaagaacttgtccagcccgaacaggatgggcgcgaccgtgaacagcgtgcgaagcaatacgtatgcagagtatgccggatccttcagctggtctgcgagagcagggctggtcgttggtctgatgctcatagctgcctcccgacttctaacagacaacaatttgaacgttagatcctatagactgtatcgtcaagtgttttgtctgttagagatggcttgctgaagtggacggccgagcttccttcgaacgcgacgtcgccgggatcggggcactcgtggatccggtgcgtcgccagctctaccaattcgtgtgctcacaatcgatgccggtgagccgagaccaggcggccgacgccgtcggcatcccg

SEQ ID NO: 1212 - DNA, 401 bp, Mycobacterium tuberculosis H37Rv
tgatgttcttccatgacgttgagcatctcctggatgcttgcgttcgcatcgacgtagtagatgctgtcccgggccaactcgccagccgtggcggtattcgggtctaggcccgcagccaggcctttgatcacaatgtcgcggtcggtgagcatgccgtgcagccggtcgtcgtccccgcagatcggcaacgcgccgatgtcgtgctcacgcatgtattgagcggcagcggttagcgtctcgtgttcgccaacacaggtcacacctgcgttcatgatgtcgcgtgcggtggtcatcgggatcctcctcgagtcggggtgctattgctgatctgctgccgaaggtacgaccacgtcgtagcgaacactagggtcgtttgacccgtgggccgcgggtcgatggac

SEQ ID NO: 1213 - DNA, 401 bp, Mycobacterium tuberculosis H37Rv
ctggcgcgcgttgaggcagctggcttgcctggcttgtcctcgccgtaggccacctcaaagtcgaaggttgtcaattgatttcaccagccggatatagcgctatgggcggccgcaggaccgatagtgatgccgatcggccccgatcggggtaaccggcaatggaacaactgacaaccatgaaggctcgtttcgacggaagcggaagacgccgacaggcacatgagcctcgcgacggggccaatccgttggctttgcgaccgtggtcgtaggtcctggcggagccgggttgccacatccgtcacaagctgacacgccgaacgtgcaaccagggcggcatcgcctgggtgtgtctccgccaccagtgcacattcggcgcagccagcccacgctcggcgcggagt

SEQ ID NO: 1214 - DNA, 401 bp, Mycobacterium tuberculosis H37Rv
gaccccagtggacacggacttcggcatgtccacgcaacgaccgaggcactccggtattcgggctgttggcccctacgcatgggccggccgatgtggtcggataggcaggtggggggtgcaccaggaggcgatgatgaatctagcgatatggcacccgcgcaaggtgcaatccgccaccatctatcaggtgaccgatcgctcgcacgacgggcgcacagcacgggtgcctggtgacgagatcactagcaccgtgtccggttggttgtcggagttgggcacccaaagcccgttggccgatgagcttgcgcgtgcggtgcggatcggcgactggcccgctgcgtacgcaatcggtgagcacctgtccgttgagattgccgttgcggtctaagcaccacctaacg

SEQ ID NO: 1215 - DNA, 401 bp, Mycobacterium tuberculosis H37Rv
gtccacgcaacgaccgaggcactccggtattcgggctgttggcccctacgcatgggccggccgatgtggtcggataggcaggtggggggtgcaccaggaggcgatgatgaatctagcgatatggcacccgcgcaaggtgcaatccgccaccatctatcaggtgaccgatcgctcgcacgacgggcgcacagcacgggtgcctggtgacgagatcactagcaccgtgtccggttggttgtcggagttgggcacccaaagcccgttggccgatgagcttgcgcgtgcggtgcggatcggcgactggcccgctgcgtacgcaatcggtgagcacctgtccgttgagattgccgttgcggtctaagcaccacctaacggtgtcgtcccgaagggacgattgccga

SEQ ID NO: 1216 - DNA, 401 bp, Mycobacterium tuberculosis H37Rv
gctcgtcgtgttcctcaatcagcacatcaatttggcaggtttttccaacgtgctcgctgtctgtcatcgcggcctccctgtcggatttgcgcttacgcccgccgatctgccccgctagctgaacgcggtatctatccaatcaccacaatcggtcgtggagtaggccagaattcttttcgcccgacccgggcccgcctagcactgacaaccgctagatggccttcaggaggtctgctttgcccttggtacggagtgtgtacagaggtgagccgcgcaactgctcaatgcgagccgccatcttgtcaccgagctcctcgagctcggcatcggtgatgtgcaccggtgtaggagcggggatcatgtcgcgttcctctacgtcggcgtgcgcctccaacacggtc

SEQ ID NO: 1217 - DNA, 401 bp, Mycobacterium tuberculosis H37Rv
cccaggacacccgccacggccggcccaccctgtccgccggcaccgccatcgcccaacaacatcccgccggcaccgccattaccaccggccgccccggccccacccagacccccaacaccgccattgccgatcaatagcggacccgcaccgccgtcaccaccgggcgcaccgtccccaccaacgccgccaccgcccccggtcccgaagtagctggccgcccctccgacgccgccggcggcgccaaggccaccggccccgccgaatccaccattgccgaacacgccgccaacgccaccgctcccgcccacgccgccggtggtgcccacccccgccgcggccccgccagcaccgccgaagcccccgctgccgatcaaccccgtcgccccaccgacaccgccagt

SEQ ID NO: 1218 - DNA, 401 bp, Mycobacterium tuberculosis H37Rv
ggccggtgaccgcatcgaagtccgttcggccggaaccgagcccgccggtcaggtcaatccgacggctgtggccgcgatggccgaaatgggcatcgatatcaccgccaatgcccccacattgctcaccggcgggcaggtccagtccagcgacgtcgtcatcacgatgggctgcggcgatgcctgcccttacttcccgggtgtctcctaccgcaactggaaactacccgatcccgccggccagcccctcgacgttgtgcgcatgatccgcgacgacatcgcagaccgcgtccaagccctgatcgccgagctgctggccaccgccaagaccagatagcgtgtgccacgctcggtgctgcgccgatacgtgaggtcccggctgggatcggattttccgcgtgtac

SEQ ID NO: 1219 - DNA, 401 bp, Mycobacterium tuberculosis H37Rv
gggtgtctcctaccgcaactggaaactacccgatcccgccggccagcccctcgacgttgtgcgcatgatccgcgacgacatcgcagaccgcgtccaagccctgatcgccgagctgctggccaccgccaagaccagatagcgtgtgccacgctcggtgctgcgccgatacgtgaggtcccggctgggatcggattttccgcgtgtacggcggctaggcaccagcggatcgcatttgtactggttagagacttgccgagtggccgcattagcctgcgtggagcgcttggtcaaaaagctcggccctgttcggccctatgggttcctgttgatctgccctgttcgtagtctcgacaaagcggctgcccgagatcgcgtgcgacgatatcgggagcggctgcggc

SEQ ID NO: 1220 - DNA, 401 bp, Mycobacterium tuberculosis H37Rv
taaaggtaacgtttacacgtggaggtgagggctagcgcccgcaagcacggcatcaacgacgacgccatgctccacgcataccgcaacgcgctgcgctacgtcgaactggaataccacggcgaagttcaactgctggtgatcggccccgaccaaaccgggcgccttttagagctggtcatcccagcagacgaaccaccccggattatccacgccaacgtactacgcccgaagttctacgactacctgaggtgatgagataagagtgaagcacaagaccgacattgacgagtggctcgacacgatcgagcccaacccggccgacgcccacgatgccagccacctgcggcgcatcatcgccgcgaaagaagcggtccaaacagccgaatctgagttgcgggccg

SEQ ID NO: 1221 - DNA, 401 bp, Mycobacterium tuberculosis H37Rv
gatgcgccactggctgatcgtcctcgctacgctgctcgtcgccgccgcgggcgttgcggccgccaacgacgtgccccgtgcgtgggccggcgacgcgccgatcggccacatcggcgacacgctgcgtgtggacaccggcacctacgtcgccgacgtcaccgtcagcagcgtcgtaccggtcgatccgccgccgggatttggctatacccgcagcggcgtcccggtcaaaagcttccccgacagctcagtgacccgcgccgacgtgacggtccgcgcggtccgggtgcccaactccttcatcttggccaccaatttcagcttcaccggagtaacgccgtttgccgacgcgtacaagccgcggccgtgcgacgcatccgattggctcgacgccgcgttgggca

SEQ ID NO: 1222 - DNA, 401 bp, Mycobacterium tuberculosis H37Rv
tgcccaactccttcatcttggccaccaatttcagcttcaccggagtaacgccgtttgccgacgcgtacaagccgcggccgtgcgacgcatccgattggctcgacgccgcgttgggcaacgcgccacagggctcgatcgttcgcggcggggtgtactgggacgcctaccgcgacccggtgtcggttgtcgtgctgctggacgagaaaaccggccagcacctcgcacagtggaacctttgacctgcgcctcgagatcgccacggccgacgtgaccgacgccgacgagttggccgccgtcgccgcacgcaccttcccgctggcgtgcccaccagcggtcgccccggagcacatcgcgtcgttcgtcgacgccaacctgtcgtcggcccggttcgccgagtatct

SEQ ID NO: 1223 - DNA, 401 bp, Mycobacterium tuberculosis H37Rv
tcggcattggcaacggcacccaagtggcgctggcctacgcagcatcgcgtcccgacaacgtcgccagactgatcctcgactccccaatcgcgttgggggtctctgccgaagccgccgccgagcaacaggtccagggccaacaggcggcgctggacgcattcgctgcgcaatgtgtcgcggtgaactgcgcgctgggctcccatccgaaaggcgcggtcagcgcgctgctgtcggccgcccggtccggtgatgggcccggcggcgcgtcggtggcggctgtcgccaacgccgtcgccaccgcgttgggcttccccgacagtggccgggtcgatagcaccacgaaattggccgacgcgctggccgcggcccgctccggggacatgaacttgctgtccgccctg

SEQ ID NO: 1224 - DNA, 401 bp, Mycobacterium tuberculosis H37Rv
ggcttgctggcccggcgcagcgcccgcacatagcacctttgcagctcgggcgcggtgctgaaggtgtggtagaaggcgcaatcgacgacggtgtcgaaccggccgtccagcccgtcgagcgtggtggcgtcgccgacctggaagttcaccgacacccccgccttacgcgcgttgtcccgagcccgctcgatggccgcgaccgacccgtcgatcccggtggccgcatatcccttggcggcgtagtagatcgcgtggtgcccgggcccggtgcccgggtcgagcacctcacctcggatcgcgcccaacgcaaccagctgttgaaccaccggctggggacccccgatgtcccatggcgtggcggccggcaacccgtgggcgacccgatcatcgcgatacatctc

SEQ ID NO: 1225 - DNA, 401 bp, Mycobacterium tuberculosis H37Rv
agtcatagcgagtgtacgagcgagaccaggtcggccagcaccgcgggatcgctttctggcagcaccccgtggccgaggttgaagatatggccggccgcaccggcgtcgacggcgcggcgtccgtcgtcgacaacggcacgtgcggcacgttccaccgccggccagcccgccaggaccaccgccggatcgaggttgccctgtaacgccgtgccgggcaccacccgggcggcggcgtcggtcagcggggtccgccagtccacgccgacgacggcccctcggcctggccgctccccggctgtcacggcctccgacatcgcgcccagcaattcggcggtcccaaccccgaagtgcgtcatcggcacgccatgctcgcccagcgcagcgaacacccgggcgctgtg

SEQ ID NO: 1226 - DNA, 401 bp, Mycobacterium tuberculosis H37Rv
ggccgaggttgaagatatggccggccgcaccggcgtcgacggcgcggcgtccgtcgtcgacaacggcacgtgcggcacgttccaccgccggccagcccgccaggaccaccgccggatcgaggttgccctgtaacgccgtgccgggcaccacccgggcggcggcgtcggtcagcggggtccgccagtccacgccgacgacggcccctcggcctggccgctccccggctgtcacggcctccgacatcgcgcccagcaattcggcggtcccaaccccgaagtgcgtcatcggcacgccatgctcgcccagcgcagcgaacacccgggcgctgtgcggcaacacgtactggcggtagtcgatcggcgagagcgccccggcccaggagtcgaatacctggatggcg

SEQ ID NO: 1227 - DNA, 401 bp, Mycobacterium tuberculosis H37Rv
gccagcgctatacgacaccgagcttgccgggcgcctggccgggttcgatcgagtgaacctggcggccatggtcgagcggttacttggactgggattgaccaagggccacggcgcggccgactggtccaagcgcccgctaccctcggcctggctgaactacgcggcgttggacgtggaactgctcatcgaactacgcgcggcgatctcgcgggtgctggccgagcaaggcaaaaccgattgggctgcgcaggaattcgagcacctgcggtcgttcgaatcaaggccacccccagcggccgcccggcaggaccgctggcgacgaacctcgggtatccacaaagtgcatgaccggcgggggctggccgcggtccgcgaattgtggacagcgcgtgaccgaatcg

SEQ ID NO: 1228 - DNA, 401 bp, Mycobacterium tuberculosis H37Rv
ggatatgcgtgccgagcaaatggcggaggactatcccgtcgtaagcatcgattccgacgcgctggatgctgcccgcatgctcgcagagcatcgtctgcctggactattggtcaccgccggagcgggcaaacagtatgcggtactccctgcctcacaggtcgtgcgcttcatcgtgccccgctatgtgcaagacgatcccttactggccggtgtgctcaacgaatcgacggccgaccggtgcgccgagagattgagcggcaaaaaggtccgcgacgtgttgcctgaccacctggtcgaggttcccccggctaacgccgacgacaccatcatcgaggtggccgcggtgatggcacggctgcgcagcccattgctcgcggtggtcaaagacggctcgctgctcg

SEQ ID NO: 1229 - DNA, 401 bp, Mycobacterium tuberculosis H37Rv
caacgagttactcacagtcggtttgattctcggcatctcggcaccggtgtccggcatcatcgacaacatcccctacgtcgccacgatgacgcccatcgtgaccgaactggtcgccgcgatgccgggccacgtccaccccgacacgttctggtgggcactggcgctaagcgccgacttcggcggcaacctgaccgccgtggcagccagcgccaatgtcgtcatgctcggaatcgcccggcgctcgggcactcccatctcgttctggaagttcacccgcaagggcgcggtggtgaccgcggtctcgctcgtgttgtcggcggtctacctgtggctgcggtacttcgtgttcggctaagcgccaacgctcacgcgtgcttagcgcgaaagcgccgaaacagcac

SEQ ID NO: 1230 - DNA, 401 bp, Mycobacterium tuberculosis H37Rv
cggtgtccggcatcatcgacaacatcccctacgtcgccacgatgacgcccatcgtgaccgaactggtcgccgcgatgccgggccacgtccaccccgacacgttctggtgggcactggcgctaagcgccgacttcggcggcaacctgaccgccgtggcagccagcgccaatgtcgtcatgctcggaatcgcccggcgctcgggcactcccatctcgttctggaagttcacccgcaagggcgcggtggtgaccgcggtctcgctcgtgttgtcggcggtctacctgtggctgcggtacttcgtgttcggctaagcgccaacgctcacgcgtgcttagcgcgaaagcgccgaaacagcacccagacgatggccaggttgtagacggcacccccgacgagatacg

SEQ ID NO: 1231 - DNA, 401 bp, Mycobacterium tuberculosis H37Rv
ggttgcgcctcgccctgccagctgtgccgcccgagccgttccagctggttagccacaacttgcgccttaagtgtgcgggccgcctccggagcagcaaacgccagatcgcaacacccggcgccgtcggccccggcgatcgaacacagcgacccgatccggtcgggcgacgggtcgatcacctcgaaagcctctgcgtgccagtaagagccacgttgcgcggtcacccgcgcccgcactcgttcaccgggcaacgcatagcggacgaaaaccacccggccctcgtggtgcgccacgcagctaccgccgttcgcgggcgctccggtgaccaacgtcagattcactgcatcgtcgccggcgcgggtcactggcgccgctcctccccatcgctttgctctgcatcg

SEQ ID NO: 1232 - DNA, 401 bp, Mycobacterium tuberculosis H37Rv
ctgcatcgtcgccggcgcgggtcactggcgccgctcctccccatcgctttgctctgcatcgtcgccggcgcgggtcactggcgccgctcctccccatcgctttgctctgcatcgtcgccggcgcgggtcactggcgccgctcctccccatcgctttgctctgcatcgtcgccggcgcgggtcaatcgaagatgccccgtcacgtgtcaccgggagccgcgtgcggctgtaacgtcttgatccgctccgacgacgtcagttgccaaggcaccgaagtcaccatcacgccgggcatgaacagcaaccggcccttgagccgcagcgcactctggttgtgcagcagctgttcccaccagcgccccacgacatactccggaatgaataccgtcaccacggtccgtg

SEQ ID NO: 1233 - DNA, 401 bp, Mycobacterium tuberculosis H37Rv
acgtggtcgtcgccgccaccggggacgacaaggtcaacgtggtgctcagcctgctagccaagaccgaattcgcggtgccgcgggtggtggcccgggtcaacgatccccgcaacgagtggctgttcaacgacgcctggggggtcgacgtcgcggtgtccacaccccgcatgctggcgtcgctgatcgaagaggccgtcacgatcggcgacttggtgcggctgatggagttccgcacgggtcaggccaatctggtagagatcaccctgcccgacaacacgccgtggggcggcaaaccggtgcgcaaacttcagctgccgcgggatgccgcgctggtgacaatcctgcgcgggccacgagtcatcgtgccggaggccgacgagccgctggaaggcggcgacgag

SEQ ID NO: 1234 - DNA, 401 bp, Mycobacterium tuberculosis H37Rv
cacgagacaccggcaattccgactgccggatagtcaccgctgaatttcgtaatgcgggttgtagatagccttcgtcccattttccagcttgcccagccggccgcgcacccgcagggtacggcccgtgtcgatgccgggtatccggcgttgacccaaccacaccagcgtgacggtgtcgctgccgtcgaacaattcggcgcgaacaccacccgagcaacccttgccattggtttccacgctacgcagggtgccaaccaccgtgacctcctggccgcgctggcagtcgatcgcacgctgtgcgccggcattgagcacctcgtcggataactcttcgacgtcgcgttgctccaggtcctccgtcaaccgacgggtgagcctgcgcagataaccctgggccccca

SEQ ID NO: 1235 - DNA, 401 bp, Mycobacterium tuberculosis H37Rv
ggcctgtgccgccgcagcctcccttagttgcgccgccatcggctcgggcaggtgcaccggtaacggcgtccgtaccggcagcggggtatcgccccggcggaccacggtgtccgccaacgcctcacgggcctcctcggtcagcgcatcgactgtctcttgtgggccgttgacgacgcatcggatcatccagcggtagccgtcgaccccgatgaagcgcaccacaccggcggcgatgccgatcacttcgcgaccccacgggccatccttgatcgaaactttggccgagtccttgcgcagcgagtcggcgagttcgccggccacctcacgccagagcccgccggtcttaggtgccgcgtaggccgcaatgctgtagcgaccgttgggtgtgatgacccacaccg

SEQ ID NO: 1236 - DNA, 401 bp, Mycobacterium tuberculosis H37Rv
cgacgcgttcgtcggcgtcggtacgttcaatcgtctgggtctgcatacctgacattgtgcccttggcaggaaagctctcgaagccggagtgcactgcatgtgggacagtagagtaatgaagcacggcttgaggctgggtttcaatggccagttcgacgacttcgacgacttcgacgataagggccggccggtactgattactgccgccgctccctcgtatgaggtggagcatcgcacacgggtgcgtaagtacctgaccctgatggcattccgggtccccgcgctcattctggccgccatcgcctacggcgcctggcacaacggactgatctcgctactgatcgtggcagcctcggtgccgttgccatggatggccgttctgatcgctaacgaccgaccgc

SEQ ID NO: 1237 - DNA, 401 bp, Mycobacterium tuberculosis H37Rv
ctcaggactttctcaggtcttcggcagattcctgcacgtcacagggcgtcagatcactgctgggtgggaactcaaagtccggctttgtcgttaaaccccatgacagtgcaagccgatcgggaggtcgctatggccgatgcacccacaagggccaccacaagccgggttgacagcgatctggatgctcaaagccccgcggcggacctcgtgcgcgtctatctgaacggcatcggcaagacggcgttgctcaacgccgccggtgaagtcgaactggccaagcgcatagaagccgggttgtatgccgagcatctgctggaaacccggaagcgcctcggcgagaaccgaaaacgcgacctggcggccgtggtgcgtgatggcgaggcggcgcgccgccacctgct

SEQ ID NO: 1238 - DNA, 401 bp, Mycobacterium tuberculosis H37Rv
atcacccgcggaatggccgaccagagccgcaccatccgcctgcccgtacacctggttgagcaggtcaacaagctggcgcggatcaagcgggagatgcaccagcatctgggtcgcgaagccaccgatgaggagctcgccgccgaatccggcattccaatcgacaagatcaacgacctgctggaacacagtcgcgacccggtgagtctggatatgccggtcggctccgaggaggaggcccctttgggcgatttcatcgaggacgccgaagccatgtccgcggagaacgcggtcatcgccgaactgttacacaccgacatccgcagcgtgctggccactctcgacgagcgtgagcaccaggtgatccggctgcgcttcggcctggatgacggccaaccacgcac

SEQ ID NO: 1239 - DNA, 401 bp, Mycobacterium tuberculosis H37Rv
cccatttctgctgctggcgggtttggagccggacctgaagtgggagcggttcatcaccgccgtccgattgctggccgagcgcctgggtgtacggcagaccatcggcctgggcaccgtcccgatggccgttccgcacacacgaccgatcacgatgaccgctcattccaacaaccgggagctgatctccgattttcaaccgtcgatctccgaaatccaggtcccgggtagcgcttccaacctactggaataccggatggcccagcacggtcatgaggtcgtcgggttcaccgtgcacgtcccgcactatctcacgcagaccgactatcccgcggccgcccaagcgctgctcgaacaagtggccaagaccggttctctgcagctgccgctggccgtgctagccg

SEQ ID NO: 1240 - DNA, 401 bp, Mycobacterium tuberculosis H37Rv
tcaaccgtcgatctccgaaatccaggtcccgggtagcgcttccaacctactggaataccggatggcccagcacggtcatgaggtcgtcgggttcaccgtgcacgtcccgcactatctcacgcagaccgactatcccgcggccgcccaagcgctgctcgaacaagtggccaagaccggttctctgcagctgccgctggccgtgctagccgaagcagccgcagaggtccaggccaagatcgacgagcaggtccaggcaagcgccgaagtggctcaagtggtggcggcccttgagcgccagtacgatgccttcatcgacgctcaggagaacaggtcgttgctaacgcgcgacgaagatctgccgagcggcgacgagctcggtgccgagtttgagcggttcctgg

SEQ ID NO: 1241 - DNA, 401 bp, Mycobacterium tuberculosis H37Rv
gaacaagtggccaagaccggttctctgcagctgccgctggccgtgctagccgaagcagccgcagaggtccaggccaagatcgacgagcaggtccaggcaagcgccgaagtggctcaagtggtggcggcccttgagcgccagtacgatgccttcatcgacgctcaggagaacaggtcgttgctaacgcgcgacgaagatctgccgagcggcgacgagctcggtgccgagtttgagcggttcctggctcagcaggccgagaagaagtccgacgacgacccgacctaacgccgcgaaagcggcccacaaaacggccccagtcggcccgacaacaagattggcgaggatgaccgagcggaagcgaaatcttcggccagtgcgcgacgtggcaccgcctacgctgc

SEQ ID NO: 1242 - DNA, 401 bp, Mycobacterium tuberculosis H37Rv
tgatgcgcatattgcgtcgcggtcacccagtaacgttgacacagaacggttttcgcggacaccgggatggcctcagccaaccggagcgatcagcgtctgacccacggccaatgccggtgtctgcaggccgttgagttcacggatgcggtcggcaacctggcgggtcggagcgttcggcgccacccggaccgccacgtcatacagggactcccccgtttccacccgtaccacggcaagcctgtcgggcacccgaccggtcgaatcggccgacccgtcggccgaaccgccggtgatcatctgcccgaactgcgccaccaaaccaagccagagagtaatcgccgcggcaagcagagccagccccaccgtcgtggccggcgggacgggcctgctgccatgcccag

SEQ ID NO: 1243 - DNA, 401 bp, Mycobacterium tuberculosis H37Rv
catccgggaaatcggcgacgccgttggtctgacgtcgacgtcttcggtggcgcaccagctgcgcaccctggagcgcaagggctacctacgccgtgacccgaaccgcccccgcgccgtcaatgtgcgcggtgccgacgacgccgccctaccgccggtgaccgaagtggccggctcggacgccttaccggaacccacctttgtccctgtcctgggacgtatcgcggccggcggcccgatccttgccgaggaagccgttgaagacgtcttcccgctgccgcgtgagctggttggcgagggcaccctgttcctgctcaaggtgatcggtgactcgatggtcgaagccgcgatctgcgacggtgactgggtggtggtgcgacagcagaacgtcgccgacaacggcg

SEQ ID NO: 1244 - DNA, 401 bp, Mycobacterium tuberculosis H37Rv
cgacgaccaacaaactgaacccttgcgcacccttttcgggatccgtctgcgccaccacgatcactaggtctgaattgatcccgttggtgatgaacgtctttgacccgtttagcacgtaatgatcaccgtgtttgacggcacgggtggtgataccttgcaggtcactaccggttccgggctcggtcatcgcgatcgcggtgatcaattccccggtgcagaagttgggaaaccagcgccgcttctgctcttcggtggccagcgccagcaagtacggcgccacgatgtcgttgtgcaggccaaaaccgatcccgctgtaccgtccggcgcaggtttcctcggtgatgaccgtgttgtaccggaagtccgcgttacccccaccgccatactcctcgggcaccgcc

SEQ ID NO: 1245 - DNA, 401 bp, Mycobacterium tuberculosis H37Rv
gtcgttgtgcaggccaaaaccgatcccgctgtaccgtccggcgcaggtttcctcggtgatgaccgtgttgtaccggaagtccgcgttacccccaccgccatactcctcgggcaccgccatgcccagaaatccctgcttgccggcctccagccacacgccgcggtcgacgatcttggtcttttcccattcatcgtgatagggcgcgacgtggcgatcgaggaacgcccggtaagactcgcgaaacaactcatgttcgggttcgaaaagtgtgcgctggtacttggtggcactgcccatggatgccctccggggaagaaaattctggtgcccaacaataccaaccgggcggttggtcggcaggtagccggggcgcgccagccgctgcgagcgtaacgccacgg

SEQ ID NO: 1246 - DNA, 401 bp, Mycobacterium tuberculosis H37Rv
cgcgatcaccgcggcccccaaatcggccagctcggcagcggcggctccggccagttcgggaaccaacaccggcgcggacggaacgatcccgatggcgctcaacacaacacaaagctaacgccttggcgggcggattcggcctcgtggagcaacggctgcaaagagaccgtgctgagaggccgacactgtcccgcgctcattggccagagacggtcaacgaaccgcaagctggcccgcggcccccaattcgccggcggaaaccgtcatcatcgcgacctcgtcacgggccaaggctacggtcgcgacaaccaccaccactaccgctgccaccagcgcgaccagggccacccggccggtgtgcagcacctcatcgagcacggtgatccccagcaccgaagcga

SEQ ID NO: 1247 - DNA, 401 bp, Mycobacterium tuberculosis H37Rv
ttggcgggcggattcggcctcgtggagcaacggctgcaaagagaccgtgctgagaggccgacactgtcccgcgctcattggccagagacggtcaacgaaccgcaagctggcccgcggcccccaattcgccggcggaaaccgtcatcatcgcgacctcgtcacgggccaaggctacggtcgcgacaaccaccaccactaccgctgccaccagcgcgaccagggccacccggccggtgtgcagcacctcatcgagcacggtgatccccagcaccgaagcgatcaccggcctcgccacggtgatcgtcggcaacgaggcggttagcgcgcccacccgcaacgacgactgctgaagcatcagcccgatcggtagaaccaggatccaggcatacaacgcgggggtc

SEQ ID NO: 1248 - DNA, 401 bp, Mycobacterium tuberculosis H37Rv
atccactccctgggagtacagcggtgatgagtcaaccgagcatcgatcagcagcgcgaacaacagtgcggtggcctgcagcgactgcaccaacaccaccgaacccatcgtcagcgcaatggcctgcagggtgaaactggcgactgcggccaggctgcccagccaccacagagcgtgacgcaaagagaggtggaacaacgtgaaatggccgacatattcttcagcggtgacctgtcgcgcggaccgctgaagtgtcacatacccgatcccggccagcaacgcggcgcccagcgccagaatggtcgcgaattcgacgctggccataggtgacctcccaccgacattcggcccggaagctgactgatacatctcgatttaagcagttgttcaatgatgatgaac

SEQ ID NO: 1249 - DNA, 401 bp, Mycobacterium tuberculosis H37Rv
agcgccacccaagccagcgcccaccgccgggtgagcaacgccagcatcgagaagccaacgccgaacaccagcgccaaccaggcgaatacccgcgagggcagcgcgacggcggccctgccggcgccgtggctgctgaacaacacatcccagccgcgcacgcttccggtatgcggcaggataaacgaccccaacagcacgaacaccaggattgcgacaaccaaagccctcgcgcctggctcgatttcgcgcgcaacgcggcgttctgccgcctcgatctcagcgcggagggcgtcgagatccccggcgtcgtgttcgtggctcatcatctgcatcctccgggcttggccgcgctgaccggcagcccgaccccaggcatgcccaggccgacggcgcgccccggc

SEQ ID NO: 1250 - DNA, 401 bp, Mycobacterium tuberculosis H37Rv
ggcggggccggcgggcacggtggcttcggcagtgctgccggcggcgacggcggcgcgggcggcgccggcggcacggtcttcggctcgggcggggccggcggtgcaggcggagtcgccactgtcgctggccacggtggtcacggcggtaatgccggcctgctatacggcaccggtggggccggcggagccggcgggttcggcgggttcggcggcgacggcggcgacggcggtatcggcgggttggtcggttctggcggcgccggcggcagcggcggcaccggtaccctaagtggtggtcgcggcggggccggcggtaacgccggcacgttctacggttccggcggcgccggcggcgccggcggggagagcgacaacggcgacggcggaaacggcggcgtggg

SEQ ID NO: 1251 - DNA, 401 bp, Mycobacterium tuberculosis H37Rv
cggcagtgctgccggcggcgacggcggcgcgggcggcgccggcggcacggtcttcggctcgggcggggccggcggtgcaggcggagtcgccactgtcgctggccacggtggtcacggcggtaatgccggcctgctatacggcaccggtggggccggcggagccggcgggttcggcgggttcggcggcgacggcggcgacggcggtatcggcgggttggtcggttctggcggcgccggcggcagcggcggcaccggtaccctaagtggtggtcgcggcggggccggcggtaacgccggcacgttctacggttccggcggcgccggcggcgccggcggggagagcgacaacggcgacggcggaaacggcggcgtgggcggcaaggccgggttggtcggcgagg

SEQ ID NO: 1252 - DNA, 401 bp, Mycobacterium tuberculosis H37Rv
cgccgtatgccgccaaccgcgtgcgtcagcgccttgtggcacacccgcaccggatcggctacctaacccgcgccggccgctgccttggcgcggcacccggtcggccatccaccgcagatccccgccaccgaacgcaccgaaacgccgaccttcggcccgcttcgtatccggttctgggcctgcggcattttcgaggtacaacgggcacgctatggcattaccacttcggcgtccaaggcgctggtgcgcggtctgaccgcgtcggcgttctcgtcgccgcgggctaccctgtagcgaatgagcgacaacgcaatccgcccgcggcccaacccgtggcagtacatccgctattgctacggggcgcggctgccggactcgatgcgagactgggtgcgcaacga

SEQ ID NO: 1253 - DNA, 401 bp, Mycobacterium tuberculosis H37Rv
ctccacctcgagcatccggccctgcaccgaactctcggcaagttcagccgaaccgatcgcgttggcgtagcgacgctcgatcttgtcgcgcacctcgtcgaggctcggcgtgttgcctggcgcggcgagctcactcatcgaccgcaacgatgcgctgacctgctcctgcatcttcgcctgctcgagctggctgagcagcttggttcgctcggcgatcttctgctgcagcaccatcgcatttcgttcgacggccttcttggcctgagctgcggcgctaagcgcctggtcatgcagcgtcttgaggtcttcgacgctctgctcggcggtcaccagctgggctgcgaacgcctcggcggcgttgttgtattcggtggccttggcagcgtctccggcggcggtgg

SEQ ID NO: 1254 - DNA, 401 bp, Mycobacterium tuberculosis H37Rv
gtggccgccgccatagaacaaggccagcaggaagaccgggaccatcaccagccgcaacagcgtcaggatattggcgaggttggcaatgcgggcgcggcctgctatctgacccgtttcaggctgcgccgacacggcaacagaataacgggttgacctgctcatgcgacccttgatgtcgatactgtttcacacgtgaccgaacgtccacgggattgccggccggtggtccggcgcgcgcgaacctccgatgtgcccgcgatcaaacaactcgtcgacacctatgccggaaagatcttgctggaaaagaatctcgtgacactctatgaagcggttcaggaattctgggtggccgagcacccggacctctatggcaaagtcgtcggttgcggtgcgttgcacgt

SEQ ID NO: 1255 - DNA, 401 bp, Mycobacterium tuberculosis H37Rv
agctcaccgagccggcgctggtcgatgttgtccttgttatacagcctcggcagcgtcccaccgagtgttggattggccttcattaccgcgtccatcgcctcgtcgatcagctgaccgatgttcttcgccggctcaccaccaacggctggcttgccttttgtgttctctgccaagaacttccagcgcgcactcaccggcacgacgaatacgccgtaaccctggtactgctcgggatcgtcgatcaggtcttctatctgagactcctccattccttcggccgccaactcggcacggattgcctcgcgccgttcgtcatacgcgtcggacacgtacttaaggaacaccaggccgaggatcacgtccttgtattggctggccgacagcgacccgcgcagcttgtc

SEQ ID NO: 1256 - DNA, 401 bp, Mycobacterium tuberculosis H37Rv
cgccatcgacgccagctcgccggccaacccctcggcaaccgtgaccggcggtatgtcgagttcgccaagcacgcccgccacgggcaagctgtccgcggcgcggtcggttttgcggtccacccgcgcaaccgggtgtccgtcaaggggccgcacgtaatacaagtgccggcgtttggccgccactgccgccgaatccagctgccgcacttggattcgcgagatcagccgcttgcggtcggcaccggcgatcgggccggccgacccgggttcggcgacgcctcctacgacgacggccgcccggcggtcccacgcagcagtcgcggcgctcatgagcgcgcgccgcgacgatgcagtgggggtaccacccgcttgcgggggacgaagcgatgaggagaagcggc

SEQ ID NO: 1257 - DNA, 401 bp, Mycobacterium tuberculosis H37Rv
accaaccggccgggaccgacaggccaccgaccgaggacgcctcgcccagactcgccgtcagcgaggccccaccaacgcccactggcgtcaccgtgtgcgccaaaccagctgctgccgcggcagctggaacggcatcggcggctgcggtcacggttgccgggtttagggcagcaaaggcgtgtccgaggaataccgcgttggggatggtggccatgacgaaccaggcggtggtgttgaccgcgccgttgatcgcgttctgaacaaacgtgataccgagcagctcctcaatgtcctgaatgattccgcctaatcccgccgcgtcggccgccgatgtcaggggcgaagcgaaccccattaccgcgttcggcaggttgctgatcagcgatcccagccccacctgt

SEQ ID NO: 1258 - DNA, 401 bp, Mycobacterium tuberculosis H37Rv
ccaggagggcaccttcccgggcgtggaacccaagatgctcgcgatacccgacaacggcgaagcggccgcggatgagttggcggcctcggtggccgcataggtgccagcgctgacccccagggtcttcacaaacaggtcgtataccgcagctgcttcagcactgacctgctggtagagagtgccgtacgcggtgaacaacggcgcctgtagcactgatatctcatcagcggcggcgggaatcacgcccgtggtggtcggggcggccgcggccgcgttctgggcgaccatcgccgagccgatggtctcgagcttgccggccgcagccgccaactcttcaggctgtgtcgtcaggaatgacatcgattgctcctcatatgactaagccagcagggctagaaacc

SEQ ID NO: 1259 - DNA, 401 bp, Mycobacterium tuberculosis H37Rv
gctccgccaacggttcccatagcatcggcaagaagcgtcatattgccaatggcggccgtggcaaagtctgccacgccacccaggccgtgaaacgcggattctacgaacagcggaacatcgagattgaggaactgcctgaccgcctccaacccggtatcggccgcggacatcaccggggaggcgaagctcaggacagcgtcggcgacgtcgctgatcaggtggctcagacccacctggcgcgcgaaagcggatgcgccggcttggccaacagcggcggcttggtgtgcgagcccggccggattggtgatgtgcgacggcctggtcagcgggttcagtcttgcggcgaccgcggatgcggccgcatagccgtacatggccgaagcgtcttgggcccacatttc

SEQ ID NO: 1260 - DNA, 401 bp, Mycobacterium tuberculosis H37Rv
tgccaatggcggccgtggcaaagtctgccacgccacccaggccgtgaaacgcggattctacgaacagcggaacatcgagattgaggaactgcctgaccgcctccaacccggtatcggccgcggacatcaccggggaggcgaagctcaggacagcgtcggcgacgtcgctgatcaggtggctcagacccacctggcgcgcgaaagcggatgcgccggcttggccaacagcggcggcttggtgtgcgagcccggccggattggtgatgtgcgacggcctggtcagcgggttcagtcttgcggcgaccgcggatgcggccgcatagccgtacatggccgaagcgtcttgggcccacatttcgccatagcgtgcctcggtagccgcgatggccgacacgttttgc

SEQ ID NO: 1261 - DNA, 401 bp, Mycobacterium tuberculosis H37Rv
gccaccatcgccacgcacatgaacgcgattatcaactggacatacagggtgcgcctggtcatcacagtgtcggtcagtgcagatcgagtaggggctcaagacctacggtgagaccagggcgttcggcgatgcggcgcaccgccaacagcacaccgggcacaaacgatgtgcgatcgaggctatcgtggcggatggtcagagtctccccctcggtcccgaacagcacctcctggtgggcgaccagtccggccagccgcaccgcgtgcaccggtatgccgtcgacgtcggcaccacgcgcgcccggcaggctggtactggtggcatcgggattgggcggcaagccttttcgggcctcggcgatcagcttcgcggtacgcgcggccgtgcctgacggcgcgtca

SEQ ID NO: 1262 - DNA, 401 bp, Mycobacterium tuberculosis H37Rv
agagtctccccctcggtcccgaacagcacctcctggtgggcgaccagtccggccagccgcaccgcgtgcaccggtatgccgtcgacgtcggcaccacgcgcgcccggcaggctggtactggtggcatcgggattgggcggcaagccttttcgggcctcggcgatcagcttcgcggtacgcgcggccgtgcctgacggcgcgtcagccttgtgcggatgatgcagctcaatgacctcggccgagtcgaaaaaccgtgcggcctgcttggcgaaatgcatggacagcaccgctccgatcgcgaagtttggcgctatcaacaccgatgtgttgggttttgcgacgagccacgattcgacttgttgaaaccgctcggcggtgaaccccgtggtaccgaccacggc

SEQ ID NO: 1263 - DNA, 401 bp, Mycobacterium tuberculosis H37Rv
ccgaggtccaccaaccgccgaacccggccgtgacacgtcgacggcgctatcccgacagtgtccgctaacgcgttgttgggcattctggcatcgccatgcagcaagctcaggattctgcggtccacctcatcaagttcagcgggtcgaacatccttcgacgaggcagcccggcgagtcttgtgttccgttgaattatcacgcatatggcctcgaaaaagaattatcatcagcaatcttgcagattaatcgaactttcttcatactgaagcgtacagtatcgagaggggtaatcatgcgcgtcggtattccgaccgagaccaaaaacaacgaattccgggtggccatcaccccggccggcgtcgcggaactaacccgtcgtggccatgaggtgctcatccagg

SEQ ID NO: 1264 - DNA, 401 bp, Mycobacterium tuberculosis H37Rv
tccatgtccggcgcgaacgttccgcggtgcccgccggcagccgggccctggaccaccaggctgtccgcgcccgcggcaatggccacaccggcctcgtagaccgacgtcacggtgatcgagaccaacagtcccagcgcgctcaaccgctgcacgacatccggcggcggcgcgccgaaggtgaacgacaccacctccggacgaacatcggctaccacctcgagtttgcgcacccagtcgtcgtcgtcaccatagacgggctggcccacctcggtgtggtagtactcggcgacctcttcgagctcgtccgcgtaatactccagctgcgcccagtcggcgacgctgggttggggcacaaacagattggctccgataggaccggtagtggcggcgcgcgcagcggc

SEQ ID NO: 1265 - DNA, 401 bp, Mycobacterium tuberculosis H37Rv
tgcaaggccaatcggccggtctcgaagcggatggtccgggtgccaaagctcccgttgtcgatggtggcggtcgtctcgaacacgccttcgtcaatttcagcggcagacatgacgtccgtgcggcctctctggattattgagctgtttcgcgtcgtcacgcgcaatccagcgggttcgccgaaccccgagagcttcccaggagaaaaggtctgaatgcggctacggccatcgatcgaagcggccgacctgccccagatccggagagcccggcagccactaccgaggaccgcccgatacaggccgggggtgctcccttggatatgcatagtgactcgctggaacggcacacgcggttctgcgcgtaccgcaccatttgctgggccgaaccggcccagaacgtt

SEQ ID NO: 1266 - DNA, 401 bp, Mycobacterium tuberculosis H37Rv
gttgaccgattcggggcgacgagccgcgctggcaatggtgcgccggcaccggctactggagacattcctggtcaacgagctcggctaccgctgggacgaggtgcacgacgaggccgaggtgctcgagcacgcggtctcggatcgcttgatggcccgcatcgacgccaagctggggttcccgcagcgcgatccgcacggtgacccgatcccgggcgccgacgggcaagtgcccacgccaccggctcgtcagctgtgggcgtgccgcgacggcgacacagggacggtggcccgtatctccgatgccgacccgcagatgctgcgatactttgccagcatcgggatcagcctggactcgcggctgcgggtgctggctcggcgcgagttcgccggcatgatctcgg

SEQ ID NO: 1267 - DNA, 401 bp, Mycobacterium tuberculosis H37Rv
gccgaggcctcggccagcgtcagctgtttgccggctttgagccgctcgatggcctgaaataccatgttctgcacgttgatccgcgcaacttccattttcgccaacttcaactggatcagttggaactgcccgatgttacggccccacagcgtgcgggtctttgcgtaatccacacacagccggtggcattcgttgatgatgcccaacgacatgagcgccacgccgaggcgttcgacggcgaaattggcgcgggcgctgtcgcggccgtccccctcggcgcaaagcaggcgatccggggtcagccgcacgttgtcgaagaacaactcgccggtcggcgaagacatcatgcccatcttcttgaacggcttgccctgcgtcaggcccggcatgccggcatcgag

SEQ ID NO: 1268 - DNA, 401 bp, Mycobacterium tuberculosis H37Rv
gcccgctccccatccagcatctggttgaccgactcggcaagcagcacgtccagaccgaactggctgaacagcttgcgcgcgatcggatacggcgacagttcaccggtttccaatgcgtcttggtgcgggcggatctccttgtcgatgaactggcgaacggcgtcgcgcaccattagatcggtgtcggaccactcgaacatggcgtgctccctccgatcgcgtggctcaacgttcggcccgttggtatgcggtgaccacggcggcgccgcccagcccgatgttgtgttgcagcgcggcggtcacgttgtcgacctggcgcgcctcggcggtgccgcgcagctgccaggtcagctccgcgcactgcgccaaccccgtcgcacccagcggatggcccttggaga

SEQ ID NO: 1269 - DNA, 401 bp, Mycobacterium tuberculosis H37Rv
gtcgaccacgaccagctcgcggccttgggcggccagcgccgcttcgacgtactcagagccgaaccggcagaaccggtctcggtgttccaccacgatccgcttcaccgatgggtcacgcagcagcgcaagaaactttcggcggtgcccgttcagcgccgaaccgacctcggtcacgaccttgtcgaccgcgatctgctcggtcgtggcccaggcggtcacccgcgccacctgccgatccaggtccggcttctgatccgctgacgacactcgcgcatacacggccgtccgcgcccggcgggatctatcggccggctggtcgtccacgagaatcagccgcccggccttccgcgccggcaccggcaacaaccccgcatgaaaccagcgatacgcagtcacccgcg

SEQ ID NO: 1270 - DNA, 401 bp, Mycobacterium tuberculosis H37Rv
cgatctgctcggtcgtggcccaggcggtcacccgcgccacctgccgatccaggtccggcttctgatccgctgacgacactcgcgcatacacggccgtccgcgcccggcgggatctatcggccggctggtcgtccacgagaatcagccgcccggccttccgcgccggcaccggcaacaaccccgcatgaaaccagcgatacgcagtcacccgcgcaacaccgttgcgctcagcccacaccgccagattcatactgttgttcctacagcacgccactgacaactaccgaccactcagaccgcaacagctgacagccccttccgaattgaacagcggcccatcgccgtgcgacgtaggccgtgtagcccagtgtgccaccgttgccgtcccggaccgcatcccc

SEQ ID NO: 1271 - DNA, 401 bp, Mycobacterium tuberculosis H37Rv
cgcatctcgggcgtgatcacgaagtgaccgccgaagtcgttgaggtagccgggcgcgtattggggatccggcagcacctgccgcagccaggagtagggcttgcgccggcgccactcccgcgggtaacccaccgacacctcctcgaaccgcacaccgtcataccaggtggtgcggggaatgtgtaagtgtccgtagaccgaacacacggcgttgtagcgggtgtgccagtcggcggtcttggtggttccgcaccacagcgagaattccgggtagaacagcgcgtcgcagggctgtcgcagcagcggaaagtggttgaccagcacggtcggttgcatccagtcgagctgttcgagacgggcccgggtggccgcgacccgctcgtggcaccaggcgtcgcgggt

SEQ ID NO: 1272 - DNA, 401 bp, Mycobacterium tuberculosis H37Rv
aacgaaatccagccagttcgaccaaccgctacggcgtgagcagacgcaaaagcccccatttcgggcccgaaatgggggcttttgcgtctgctcggccaacctagcccaactgctacggggtcggcgagggttttggggtgtcggtccggctgatccggcagtccgactgtgcggtgaggaccgccgccttctgggtcgagcatttgaactcgacgccgccatgaccggcgaagtacacgtcgtggtcggccggcttgttcttcatcaccccaaagccggtggcaccgaactgttcgacaccgtccttgacgatctgcacggcctgcagccacttgtcgtcggggatcggtccactgaaaacgatcatgaaatacgccgctttggccctggtccattcatac

SEQ ID NO: 1273 - DNA, 401 bp, Mycobacterium tuberculosis H37Rv
gcatccagctccgcctgcagctccgtttgcttggccagcgtccgcgcccactgcgcctcggtggatcgcagcccggggatcggcaccacccggttgatcagcgcatcgatcgtcagctcggcggccgcggcggcatggcgtagtgcggccagctcggactgaaccttcacaatcccgtcggcggccctgtcggccgcccgggcaaccgccaacgcctcgttgccgtgggcgtcgaggtctcggcgaatgcccgcgttgtggtgtgccgccgcctcagcggtcttgccacccgagttcgcaaaaatcgacagcgcggccaactgacgcgacgcctcgaacgtcacctccgctcgggcactggccgcgtgaaacacctcccggaccgcttgcgcgttccaccg

SEQ ID NO: 1274 - DNA, 401 bp, Mycobacterium tuberculosis H37Rv
ccggactggcctccggcgaccaccgagcgggcgtggtacctgcagcccggtggccgcctgggtgagagcgctccggcttccggcacgccaccggcgacgtttcgctaccaccccgccgacccgacaccgaccaccggtggtccgctactgtcatccaacggcggttaccgcgacgacagccggctggccacgcgcgccgatgtgctgtgcttcaccggggcgcccctcacccacgacctctgcgtgcacggaaaccccgtcgtcgagctggtgcacagctcggacaacccctacgtcgacgtgttcgttcgggtcagcgaggtggacgcgaagggccggtcccgcaatgtcagcgacggctaccggcgccttggtgacgcgccggagctggtccgcgtcga

SEQ ID NO: 1275 - DNA, 401 bp, Mycobacterium tuberculosis H37Rv
cgtcgacgccatcgacgaccgcgccgccgagttctacggtcaccacggcttcttgcccctcgagggtcgacgcctctaccggcggatcagcgacatcgcgcgggcgctgggagtatgaagcgctatcgtcgcttggcgacgtgctgccgatcgatcgcctcgaatggcctcgttgttgttgtcgtcggtgatggggaggggcaacggcaagattttggatccggtggtggccaccacggggatgggccgctcgacggcgcggcagatgttgaccggcccgaggttgccgggcccggccgagcaggtcgacgggcgtagccttcggcctcggggcttcagcgacgaagccagggcgctgctggagcacgtgtgggccttgatgggcatgccgtgcggcaagt

SEQ ID NO: 1276 - DNA, 401 bp, Mycobacterium tuberculosis H37Rv
ggcttcttgcccctcgagggtcgacgcctctaccggcggatcagcgacatcgcgcgggcgctgggagtatgaagcgctatcgtcgcttggcgacgtgctgccgatcgatcgcctcgaatggcctcgttgttgttgtcgtcggtgatggggaggggcaacggcaagattttggatccggtggtggccaccacggggatgggccgctcgacggcgcggcagatgttgaccggcccgaggttgccgggcccggccgagcaggtcgacgggcgtagccttcggcctcggggcttcagcgacgaagccagggcgctgctggagcacgtgtgggccttgatgggcatgccgtgcggcaagtacctggtggtcatgcatgacctgtggttgccgctgttgaccgctgc

SEQ ID NO: 1277 - DNA, 401 bp, Mycobacterium tuberculosis H37Rv
gtgcatcgggagcgcggccgggctggtattcgcgtgggactgaaggagcttaggcaggaacgcacatgacgtacgcagccagggacgatacgacgctccccaaactgctcgcacagatgcggtgggtggtgctggtggacaagcgtcagctcgcggtgctgctgctagagaacgagggaccggtcgcttccgcgacggacacgttggatacgcgcggtgatagcgactatgaaaaccagccggtcgacgcagtggagcggctatgtcggcgtttggctgaccaggcggtgcgtcagtggggttttatgcagggcctcaagcagaagctcggaccaggtgtcgacgtgcggatgaagctggtggagtggaaccgatgagctttaatggctcttccggaatca

SEQ ID NO: 1278 - DNA, 401 bp, Mycobacterium tuberculosis H37Rv
acggtttttcgcgcatgccattcggccgcgatctggcaccgggcatgctgcatcgccacagcgcgcacaacgaagcggtcgcccgcatcggctggtgcatcgccgaccgccgcatcggcgtcatcaccggcgaagtcggcgccggcaagaccgtcgccgtgcgcgccgcactagcgagcctggatcgcagccgccacaccatcatctacctgcccgaccccaccgtcggcgtccagggcatccaccaccgcatcgtcgcctcgctcggcggacaacccctcacccaccacgccaccctggccccacaggccgccgacgcgctagccgccgaacaagccgagcgcggacgcacccccgtcgtggtcgtcgaggaagcgcacctgctcggctatgaccaactg

SEQ ID NO: 1279 - DNA, 401 bp, Mycobacterium tuberculosis H37Rv
gtcgttcaaccggtcatagagcgtcaaatcagcgcctgtttcgcgggcgaggatcttcagcagttgttctgggagaaggccgccatccttcgtgatgcgatcctcactgattgagacgatctcgtgtgctgcggtgttgcggacccggctctcgaaccttccgagtacttcaagagcaccaactcgatcgggtgcgaattggcggagcagtgcgagccagtccttggtgtagaggtaccactccgcgtttggcgatttcggagggtgcttgagcgcgcaccgtatctccggctctctttccagctttcggcggtcgacgcggcccatgtcgtcgagatagcggtcctccggaaggtgttttgccacagccgccctgagcacgatagtgattgccggggtag

SEQ ID NO: 1280 - DNA, 401 bp, Mycobacterium tuberculosis H37Rv
ctccacgtggtactccttcgaggtccgcttctcgccggatccgataaacaccggccccaggcaccgcagcgtgagttcgaacggcttcaggtaggtgttcatgcggcggactccgggagtgcgagaaatagcggtcgcgcgtagctgtagaccggatggtttccgcccaggctgacgtcgaggatgcctccttggaagggtcgcgagaagaccgagccggcggcgaatttgtagatgtcgcgtttgcgcaggggcatgtcagcgtatgtgctcgacgcgacgaatccactgcgcttgacgaggcggtacgtcgcgccggcgagtgcggcttcgagctcgtcgtccgtgggtagggatgtcgtgagcgtcatcagactggccgcgtcgactgtcggcgtgag

SEQ ID NO: 1281 - DNA, 401 bp, Mycobacterium tuberculosis H37Rv
tgatcttccactccaaagatgtggtcgagcgggccagcgcgtactgactgtacgggttcaccggcacggtgtggagggtctgcacataatcggccgggatcgactccatgaggacgccatgaagatgcggccccagggtcgccaccctcgcgcgttcgagcggggcatcaacctctagagtcagcgtcaatcgcgacaagtgttccgtcatccggcgatctcctcggtgagaaaagcccaccagaataagcgttggtgaaatccaggtcaagcctgattccgccgcactcgcgcgatgtcggcctcggggctggccactccgacgtagcagatccgtccttctgatgccgcctcggcgagcagccaagggatggcttcctaacgagccggggttgtagcgg

SEQ ID NO: 1282 - DNA, 401 bp, Mycobacterium tuberculosis H37Rv
cggccgcgcggaggatggcgccgccaatgctgctgttgcccgcgccgtcaattgacgccagcagggaccgaaccgacagcagatcactcgcagcgccgactgggcgtacagctcagacccaagcgatgccgcccagtcaacccacggcctcgcggacccgggcggcgacctcggccagcgcggcctcgtcgtgcaccggcgccgccaacgtcggcgtcaccggcagctgcacccagctggtgcaaccgccgtactcgggcctacgcgccagccggaccggctcggccagcgggatcgccgagaccaccaagacggccagtttgtgcttgggccgaaagtcgagccggtcggcgcgcaccgactcggcggtccagatgtgcagatcctcgatggcgtccaga

SEQ ID NO: 1283 - DNA, 401 bp, Mycobacterium tuberculosis H37Rv
gcggaggatggcgccgccaatgctgctgttgcccgcgccgtcaattgacgccagcagggaccgaaccgacagcagatcactcgcagcgccgactgggcgtacagctcagacccaagcgatgccgcccagtcaacccacggcctcgcggacccgggcggcgacctcggccagcgcggcctcgtcgtgcaccggcgccgccaacgtcggcgtcaccggcagctgcacccagctggtgcaaccgccgtactcgggcctacgcgccagccggaccggctcggccagcgggatcgccgagaccaccaagacggccagtttgtgcttgggccgaaagtcgagccggtcggcgcgcaccgactcggcggtccagatgtgcagatcctcgatggcgtccagaccctctg

SEQ ID NO: 1284 - DNA, 401 bp, Mycobacterium tuberculosis H37Rv
ggaggatggcgccgccaatgctgctgttgcccgcgccgtcaattgacgccagcagggaccgaaccgacagcagatcactcgcagcgccgactgggcgtacagctcagacccaagcgatgccgcccagtcaacccacggcctcgcggacccgggcggcgacctcggccagcgcggcctcgtcgtgcaccggcgccgccaacgtcggcgtcaccggcagctgcacccagctggtgcaaccgccgtactcgggcctacgcgccagccggaccggctcggccagcgggatcgccgagaccaccaagacggccagtttgtgcttgggccgaaagtcgagccggtcggcgcgcaccgactcggcggtccagatgtgcagatcctcgatggcgtccagaccctctggc

SEQ ID NO: 1285 - DNA, 401 bp, Mycobacterium tuberculosis H37Rv
gaggatggcgccgccaatgctgctgttgcccgcgccgtcaattgacgccagcagggaccgaaccgacagcagatcactcgcagcgccgactgggcgtacagctcagacccaagcgatgccgcccagtcaacccacggcctcgcggacccgggcggcgacctcggccagcgcggcctcgtcgtgcaccggcgccgccaacgtcggcgtcaccggcagctgcacccagctggtgcaaccgccgtactcgggcctacgcgccagccggaccggctcggccagcgggatcgccgagaccaccaagacggccagtttgtgcttgggccgaaagtcgagccggtcggcgcgcaccgactcggcggtccagatgtgcagatcctcgatggcgtccagaccctctggcc

SEQ ID NO: 1286 - DNA, 401 bp, Mycobacterium tuberculosis H37Rv
gccgccaatgctgctgttgcccgcgccgtcaattgacgccagcagggaccgaaccgacagcagatcactcgcagcgccgactgggcgtacagctcagacccaagcgatgccgcccagtcaacccacggcctcgcggacccgggcggcgacctcggccagcgcggcctcgtcgtgcaccggcgccgccaacgtcggcgtcaccggcagctgcacccagctggtgcaaccgccgtactcgggcctacgcgccagccggaccggctcggccagcgggatcgccgagaccaccaagacggccagtttgtgcttgggccgaaagtcgagccggtcggcgcgcaccgactcggcggtccagatgtgcagatcctcgatggcgtccagaccctctggccggttaaccg

SEQ ID NO: 1287 - DNA, 401 bp, Mycobacterium tuberculosis H37Rv
actgggcgtacagctcagacccaagcgatgccgcccagtcaacccacggcctcgcggacccgggcggcgacctcggccagcgcggcctcgtcgtgcaccggcgccgccaacgtcggcgtcaccggcagctgcacccagctggtgcaaccgccgtactcgggcctacgcgccagccggaccggctcggccagcgggatcgccgagaccaccaagacggccagtttgtgcttgggccgaaagtcgagccggtcggcgcgcaccgactcggcggtccagatgtgcagatcctcgatggcgtccagaccctctggccggttaaccggcagtgcggcaacaactttcgctgcggcccgcagtagcacacactcgtcggtgctgtcggcggccgccgggcccagcag

SEQ ID NO: 1288 - DNA, 401 bp, Mycobacterium tuberculosis H37Rv
ctgggcgtacagctcagacccaagcgatgccgcccagtcaacccacggcctcgcggacccgggcggcgacctcggccagcgcggcctcgtcgtgcaccggcgccgccaacgtcggcgtcaccggcagctgcacccagctggtgcaaccgccgtactcgggcctacgcgccagccggaccggctcggccagcgggatcgccgagaccaccaagacggccagtttgtgcttgggccgaaagtcgagccggtcggcgcgcaccgactcggcggtccagatgtgcagatcctcgatggcgtccagaccctctggccggttaaccggcagtgcggcaacaactttcgctgcggcccgcagtagcacacactcgtcggtgctgtcggcggccgccgggcccagcagg

SEQ ID NO: 1289 - DNA, 401 bp, Mycobacterium tuberculosis H37Rv
tcgacaagctgatactcgggagcccagacactctcgccacggtcgcggctgtgcgcggtggtgaatcgagtcaccggcatcacttcggtgtgccgcttggccagcagcgcctggcctcgtgccggttcaccgcccgagtccagcaggtagcttgcacgctgccaggccgatgtcggccggcccgacagtagacgctccaggcgctcgtcactgcagtcggcgacgaggtcgtcaaggtgggggacaaggtcggcccacggcccgaacgaggccgggcgcgtggcgatttgcacaagtaatgcttctggtcctagcgccggtaacccggtcgcccacgcgacgaggtcgagccgccgccggaccagcaacgcgggacgcggagccagcagtgcggtgtccgc

SEQ ID NO: 1290 - DNA, 401 bp, Mycobacterium tuberculosis H37Rv
caagaacgtcacccctgaaatcaagtgggaccaggatgcactgacgcgttgctcggaccagtcacccaggcgatgcgcctcggctcaaaaactcaacccacggcctcgcggacccgggcggcgacctcggccagcgcggcctcgtcgtgcaccggcgccgccaacgtcggcgtcaccggcagctgcacccagctggtgcaaccgccgtactcgggcgtacgcgccagccggaccggctcggccagcgggatcgccgagaccaccagcacggccagccgatgcttgggccgaaagtcgagccggtcggcgcgcaccgactcggcggtccagatgtgcagatcctcgatggcgtccagaccctctggccggttaaccggcagtgcggcaacaactttcgctgc

SEQ ID NO: 1291 - DNA, 401 bp, Mycobacterium tuberculosis H37Rv
gcacggccagccgatgcttgggccgaaagtcgagccggtcggcgcgcaccgactcggcggtccagatgtgcagatcctcgatggcgtccagaccctctggccggttaaccggcagtgcggcaacaactttcgctgcggcccgcagtagcacacactcgtcggtgctgtcggcggccgccgggcccagcaggtcgcggtgctcggggcgaacccgctcggcgtggctgtgcgcgaccgtcgggaacaacaagaactcgtgggccgccacctcgaagcgcttctcgccgatcccgcccttacgcagcagcaccgtctgccggccgtccagcagcgcgtgcaccgccgcgctccactccttcagcgctggcgtcaccgcgatcccgcgagccgggcagccacgt

SEQ ID NO: 1292 - DNA, 401 bp, Mycobacterium tuberculosis H37Rv
gtgaagagttcgtcgtcatccgcggccgccatcgccacacccgagaatcgacccttcagcgcgtgcggccccgtcgctgccaccagccgggccacggtgcggccgtgtttggtgatctcgatctcctcgccctgggccacttcatcaagcaaggagaggatcttcgccttcacctccgtagcggtcatttttctggtcattaggacagtctaacggtcctgttacggtgatcgaatgaccgacgacatcctgctgatcgacaccgacgaacgggtgcgaaccctcaccctcaaccggccgcagtcccgcaacgcgctctcggcggcgctacgggatcggtttttcgcggcgttggccgacgccgaggccgacgacgacatcgacgtcgtcatcctcaccgg

SEQ ID NO: 1293 - DNA, 401 bp, Mycobacterium tuberculosis H37Rv
cgaccgacgcgttgcgggccggcctggtcaccgaggtggtggcccacgaccagctgctgcccaccgcccgccgggtggcggcgtcgatcgtcggcaacaaccagaacgcggtgcgggcattgctggcgtcctaccaccgcatcgacgagtctcagaccgccgccgggctgtggctggaagcctgcgcggccaagcaatttcgcactagcggcgataccatcgccgccaaccgcgaagccgtgctgcagcgcggccgcgcgcaggtgcgttagcggcgatcgcaagcgcggcgaagccgggtgctgggggtacctcccgcgtgcgggggacgggtcgccgccatcagcccttcagcgaagccgggtctcggtgcggctgttgaagaggcgcacctcctgcga

SEQ ID NO: 1294 - DNA, 401 bp, Mycobacterium tuberculosis H37Rv
ggtttgctggctgaagtaggcggtgttcgtcgggttggtgacgaatgcgatgaacttgagcgcgttgacttttcgctcctcggagagcttggccggtatcgccagccccgcaccgcccgtcggacaggcgggcgctgcgtccgggcccgtgggcagcggtgcggcgccgaagtcgaatcgggcagatgcggtgatgccggccagcgagccggtggatgccacggccgaggccaggattccggtggcgaactcgttggcaatatcgttggcgaccgccgcataacccttgccatggatggagttccgatagaagttgccggccgcgatcgtggcgggctcggtcaatgtcaatgtccacttgtcggagtaggcaccgccgaatgcccagttcggtccctgaa

SEQ ID NO: 1295 - DNA, 401 bp, Mycobacterium tuberculosis H37Rv
agaagttgccggccgcgatcgtggcgggctcggtcaatgtcaatgtccacttgtcggagtaggcaccgccgaatgcccagttcggtccctgaaacgtccacgagatgaggtcggcgttagcccagccgtgcgccgatcgaccggcgccgaccacgcgctgtaactccggaccccactcgtcgaactctgaccaggattgcggtccgcggtcgggtaggccggcctgttgccacgccgccttgttgtagtagaacagcggcgtcgagcgagcatacggcacagcgtaatggcggccgttgaactcatagtcggccagcagcgaatcgacgtaatccgttgtgtccaccccaacttggccgaacaggtcgtcaagggcagtgagaacaccgctgagggcgaaa

SEQ ID NO: 1296 - DNA, 401 bp, Mycobacterium tuberculosis H37Rv
accaggattgcggtccgcggtcgggtaggccggcctgttgccacgccgccttgttgtagtagaacagcggcgtcgagcgagcatacggcacagcgtaatggcggccgttgaactcatagtcggccagcagcgaatcgacgtaatccgttgtgtccaccccaacttggccgaacaggtcgtcaagggcagtgagaacaccgctgagggcgaaatggaaccaccatcggtcgtcgagcaaaacgacgtcgggcacgtcggttccgatgagcgccgcattgaatttctgtgccacctcgtcgtagtccttgccggcgtcgatcagcttgaccgacagagtggggaatcggtcctggaaacgaccgatcagctcccgttccgccgcgctggattggccgggatga

SEQ ID NO: 1297 - DNA, 401 bp, Mycobacterium tuberculosis H37Rv
gcgcacgcgctctttcgatgaccgaagccgtgctcgttgcggcgccgccatcggcgcagtgtagctccgtattctgtcggcgagtttgccgccacggtcgatgaaccaatcaccgccgtcacggcaatgtcggccagctacgccgcgcccgtcaccgcccaccgaccgctgtacgcccgccatccgacgaatatcagccgcagcacgataaacgtgcccagtcccgaccagatacccgccagcccccagccatacgccagcgacaaccagacaagcggcaaaaagcccaccaacgcactcgccaccgtcgccgtccgcatgaacgcggcgtcgcccgcgcccagcagcaccccgtcaactgcgaaaacaattcccgcaaaaggcaattggactaccatgaa

SEQ ID NO: 1298 - DNA, 401 bp, Mycobacterium tuberculosis H37Rv
taaacgtgcccagtcccgaccagatacccgccagcccccagccatacgccagcgacaaccagacaagcggcaaaaagcccaccaacgcactcgccaccgtcgccgtccgcatgaacgcggcgtcgcccgcgcccagcagcaccccgtcaactgcgaaaacaattcccgcaaaaggcaattggactaccatgaaccaccacggcaccccgatcgcggcgagtaccgatcgatcgtcggtgaatagcccgggcagcaccgaggagcctagccctaacgccgctgccaaaattcccgccgccaacagcgaaaacgccgtcacccgccatgccaccgccttagcgtgcccggcatcaccggcacccaacgcggcaccgaccagcgactgcgccgcaatcgctagc

SEQ ID NO: 1299 - DNA, 401 bp, Mycobacterium tuberculosis H37Rv
cggtcttcgtcctccgggctgacgacctgaacgttgtagttcatctcgctgcccagcaactccagcgtctcgtcgccgaccgactgggtggccgtcaccatctcgccgaggttgaacagcgcctgcaccagcgccgcggggttggcgtcgattttgtccgcgaagtcgctgagcgacgcgccgcgtgcgagccggatcgtttcgccgttgccgtgcggcaaccgcaccccgccgacgaccggagcctgcatcgagtcgtactcctggcgcttctgccgcttggacttgcggccgcgccggggcgcaccacccgggcggccgaacgcgccggcggcaccgccacgctgcccgggacggccaccgccgccgcccccgggacggccgcggaagcccgttccggg

SEQ ID NO: 1300 - DNA, 401 bp, Mycobacterium tuberculosis H37Rv
tcccggctgtcggactttgattaagacgttcttcagggtgtccgcggcggtcaccgtgcggccgagatcggcctcgttggcccaggccaccaggctggcgatggttggggtgtcgccggtgtcgtggaccaccgcctcgggcagcccatcgatgggcagggtgtccgggcgggcggtgacaaccgcctcgacgttggccgcataacccgactcgaggcaccggacaaatgcgtcctccccggacggactctcagccaagaactcttcggacgcactgccgcccatcgccccggacactgccgaaacgatgacatagcgcacctgaagtcggtcaaatatgcgctggtaggcctcccggtgagcgtggtaggccgccttcagcccggcggcgtcgatgtcaa

SEQ ID NO: 1301 - DNA, 401 bp, Mycobacterium tuberculosis H37Rv
ccgggcgggcggtgacaaccgcctcgacgttggccgcataacccgactcgaggcaccggacaaatgcgtcctccccggacggactctcagccaagaactcttcggacgcactgccgcccatcgccccggacactgccgaaacgatgacatagcgcacctgaagtcggtcaaatatgcgctggtaggcctcccggtgagcgtggtaggccgccttcagcccggcggcgtcgatgtcaaaggagtaggagtccttcatgacgaactcccgagcgcgcaggatgccggcccgcggccgcgcctcgtcgcggtacttggtctggatttggtacagcgtgagcgggaagtccttgtaggagctgtactcgcccttcacggtcagggtgaacagctcttcgtgggtg

SEQ ID NO: 1302 - DNA, 401 bp, Mycobacterium tuberculosis H37Rv
tcgttttgaatcttaggtagcgcgacgatggcgacggtgctgtccatggtcgccagcagctgcatcccgccgatagcaataaccgcagcgataaagctgcgcgagggcagccaagtcgggtagtacctgctggggcgctctgaagcggtctcctccgagcgcggcgggcgcatcggggccggacggtgtgggcgtccggctgtccagttacggaccgcccgctctgtgtcgttgagagccgtcatagcgggttaccttacagtattcttaagaattgtttaaaccccgaacgccgctcaggccgactacagccccgatcacgatgatcgcgggaggtcggatccccgccgcgcggaccttctccggcgtgtcggcaagggtggcccgcaacgtctgttgag

SEQ ID NO: 1303 - DNA, 401 bp, Mycobacterium tuberculosis H37Rv
cgttttgaatcttaggtagcgcgacgatggcgacggtgctgtccatggtcgccagcagctgcatcccgccgatagcaataaccgcagcgataaagctgcgcgagggcagccaagtcgggtagtacctgctggggcgctctgaagcggtctcctccgagcgcggcgggcgcatcggggccggacggtgtgggcgtccggctgtccagttacggaccgcccgctctgtgtcgttgagagccgtcatagcgggttaccttacagtattcttaagaattgtttaaaccccgaacgccgctcaggccgactacagccccgatcacgatgatcgcgggaggtcggatccccgccgcgcggaccttctccggcgtgtcggcaagggtggcccgcaacgtctgttgagc

SEQ ID NO: 1304 - DNA, 401 bp, Mycobacterium tuberculosis H37Rv
tcggtcaccagatcggcggccgcaaccaaccgctggggtgcgtctcgcccggtgatcaccacatgctgatggccaggccgggctcgcaggacatcgacgacttcgtcgacgtcgagccaaccccacttcagtgggtaggtgaactcgtccagcagatagaagtcgtgacgttgcgtggccagccggagcgcgatctcggcccaaccgtccgccgccgcggccgcacgatcgacgtcggtgccggccttgcgagacgtacgtgtccaggaccagcccgcacccatcttgtgccactccaccgctccgccgatcccgtgctggtcgtgcagccggcccagttgacgaaacgccgcctcctcacccactttccacttagcgctcttgacaaactgaaacaccgc

SEQ ID NO: 1305 - DNA, 401 bp, Mycobacterium tuberculosis H37Rv
ggcgatgtgcgccgacgacgtcggcgacagcaacagcgttgcctcgtgctggcggaaggtgatcaccgccaccttgtccctgcgctggtaggcgtcgcgcagcagcgacagggtggcgccactgaccgcagccatccggtcccgagcagccatcgatccggaagcgtcgacgacgaagatcaccagattgccttcgcgaccctcgcggatggcccggcgcacatcgtccggccacgggcgcaacggcccggctccgaacgcacgctcgccggcggccagcagggtagcgaacaggtgcagtccatgtgcgtcggggtcgctgacctcggcggccgccaccacactgcccgaggcgttgcgggcccgagaccgtcgccccggcgcgcccgtgccgacccccg

SEQ ID NO: 1306 - DNA, 401 bp, Mycobacterium tuberculosis H37Rv
caggttctgtcgacttcgagcgtgagttcggttgtgaggcaggttcattggctgactggccgcccccgggcggatcgggctcgggctctgggtcgacgctcgccagcgccagcgcctcatccagctggtcgcggtcgatgccgtgatcgtcgaacgggtcgcgacgacgacgatgcggcaacgccagttctgctgccgcccggatatcctgctcctcaacggtgcggacaccacgccaggcggcgtgcgcggcggcggtccgggccactaccagatcggcccgcatgccgtccacgtcgaacgccgcgcacaacgcagcgatgcgccgcaactcgttgtcgcccaacaccacatcgtctaccgtggcccgggccgcggcaatccggtgggccagctccgcg

SEQ ID NO: 1307 - DNA, 401 bp, Mycobacterium tuberculosis H37Rv
ctcggacgtccgctaattggtaacggcgccgacggatcgacaccggggcaggccggcgggcccggcgggttgctgtacggcaacggcggtaatggcgccgccggtgggcccaaccaggccggcggcgccggcggcaacgccggcttgatcggcaacggcggggcgggcggcgccgggggtgttggcgcggtcggcggtaaacgcggcacgggcggcctgctattcggcaacggcggggccggcgggcaaggcgggctcggcctcgcaggtatcaacggcggcagcggcgggcagggaggccacggtggcaacgccatcctgttcggccagggcggtgccggcgggccaggtggcaccggcgccatgggcgtcgccggcaccaatcccacccccatcggcac

SEQ ID NO: 1308 - DNA, 401 bp, Mycobacterium tuberculosis H37Rv
cgccagcgcggcgagatcacccgcgcgggggtcaccggcctggtgctcaatagcccgttcctggatctgcaaggcccggcaatcctgcgcctgccgctgacctcggcgttcttcgccgcgatggcgcgaatgcgccccaagtgggtagcccggccaccaaaagaaggcggttacggttgcacgctgcaccgggactatgacggagagttcgactacaacctgcaatggaaaccggtgggcggtttcccggtcaccttcggctggattcatgccagccgtcgtggccacgcacggttacatcgcgggatcgacgtcggtgtgcccaacctgatcctgtgttcggatcacacggtacgggaaaaggccgacccggcgaccctgcaccgcggcgatgcggttct

SEQ ID NO: 1309 - DNA, 401 bp, Mycobacterium tuberculosis H37Rv
gccggcgcgatggcccaggacgcgatcaccatcgggaaattccatggcgtgatcacaccgaccacgcccatcggttcgttgaaagtgacgtccaccccgccggcaacgggaatctgcctgccggacaaccgttccgggctggcggcatagaacgccaacacgtcacgcacgtggccggcttcccactcggccgacacgatcggatgtccggaattggctacctcgagcgcggccagttcgtcgaggtgggcttgcacggctgccgcgaatgcgcgcaggccggccgcccgctgcgccggtgccaaccgtgcccagcgccgctgcgctgctcgcgcgcgttgcacggcgtcgtccaccgcgttggcgtcggtgtggtcaactgaggccagcacttcctcggt

SEQ ID NO: 1310 - DNA, 401 bp, Mycobacterium tuberculosis H37Rv
cgcgaaacgggccttgacgaggtcgagttcgattgaccccagccgacgcaccagcgccagccgggtgggcacgatccattcgccgtggcgtttcagggagccggcccagccgcgcagctccacccggtcggccgcggacgtgacgatcgcgccaggcctgggcaggtcaccgaccagcccatccagctcgcttcgcgtacacgcgaaggaaacccgtgacgagcgctgctcgaactcgtcgatgttgataagcccgagcgccacggcgttgtgcagtcgtcgcattgtgccgttgcggtcggcgtccgagacccgcaacgccaccatgtccccaccggtctccgtcatggcccattcccgagagttctggcacggcttcaacggcgaacttcgcctacccc

SEQ ID NO: 1311 - DNA, 401 bp, Mycobacterium tuberculosis H37Rv
gggagccggcccagccgcgcagctccacccggtcggccgcggacgtgacgatcgcgccaggcctgggcaggtcaccgaccagcccatccagctcgcttcgcgtacacgcgaaggaaacccgtgacgagcgctgctcgaactcgtcgatgttgataagcccgagcgccacggcgttgtgcagtcgtcgcattgtgccgttgcggtcggcgtccgagacccgcaacgccaccatgtccccaccggtctccgtcatggcccattcccgagagttctggcacggcttcaacggcgaacttcgcctaccccccgcaacttaccgctgttgaaaggccgccgaaaacctagcagtttaggtaatcctttccgacgaagagcgggaggcgttccggcagcaagccgca

SEQ ID NO: 1312 - DNA, 401 bp, Mycobacterium tuberculosis H37Rv
cgatccaacgtgatcgaaaccgacgacgcaggtgatggggcgacctcgtgcagcaccgagacgtcgacgccattttggttgacgctcaccacccgccaacccgccttgccgtcgagttcatcgacgacggccttcttgacatcgttgaggaccgccggcgcgaagtgcttgtcggtcgggagcagctcggcctgcggtgtgatcaccacgccaggcagctgcccgatcgccgcggccacccggttgctgtcgtcggcgtgcaacgtgaccaggtccaacggctgggtcgacgagctggcctgttcggccagcagctgcggatcattgagcgtgtcgtcgaaggggtgcagcgcgcccaccaccgcgtgtgccgtgccgaagagctcgcggccggcctggcc

SEQ ID NO: 1313 - DNA, 401 bp, Mycobacterium tuberculosis H37Rv
gatcgggtcgtcgtcgagtacccgccacacggcggcggcgtcacgcaccacggacacttgccgctcgccgacaagccgagagatgggcggagccgacatctgcgaactccctttggtgggaactgacggccactgaatgaaaagctgacccctatcagcttacggtcacaataggcgaaccgctcggtgtcgcgcccggatcttgctcgcccatttcggcggccagccgcatcgcctcctcgatcagcgtctcgacgatctgtgcttcgggcacggtcttgatcacttcgccccgtacaaagatctgacctttgccgttgccggacgccacgcccaggtcggcctcacgtgcttcacccggaccattgacgacacaccccatcacggccacccgcaacggc

SEQ ID NO: 1314 - DNA, 401 bp, Mycobacterium tuberculosis H37Rv
gttcagctgggccaagaagaaccagaacgccacccacagcccatggtcgacggtgtcgccgccgatgatgctggcgcccaccacacttatcggcgtctgcgggtcacgctgcccgccgccgatcgcccgcaccagcgcacctaccttggtcgggagggcggccagcgccttgcccacctccacggtcaggtcgccggtgaccgcgaatgtggccggcatggcggagaacacgccgtagcgcacaggcccgacccgggcggcgcccaccccaatcgcaccgaccgttgccggctggagctcaccgccctgcccgttagggatccagcgttgggtggattcgatgtccacgtaggtaacaatcgcggtgccgtcacgctcgacaacgatcgggacgctgccgt

SEQ ID NO: 1315 - DNA, 401 bp, Mycobacterium tuberculosis H37Rv
cacagtaacgttcggcgcggtcaaggcgaggcagcccgtgtaggcggtttgcctcgctcatccggcggcttcgtgccgatagatcacgtgatatcccaagcgcatgacggtgacaccgcgcccagcgcaagccgatccccgcagcatgcctgctgaagtcgcgtctcgcgaactgcgcaacaacaccgccgggctgctacggcgcgtgcaggccggcgaagacatcaccatcactgccaacggcaaacccgttgcgctgctgaccgcaggcagcccgcacggcgccgatggttgagtcgagacgagctgctgcggcggcttcggcatacgcaagcagatgcgggattgcacccgcgacctcgcaacgctcactggcgacaccaccgacgatctcggtcccg

SEQ ID NO: 1316 - DNA, 401 bp, Mycobacterium tuberculosis H37Rv
tgctaatgcctccggcgtaatcgtccgcggaggccgccgacccgcccgagagcgactgagcatgtgccagaatgttcgggcagtgggagttcgacgtcagtccaaccggaggaatcgccgtggcaagtaccgaggtggagcacttcgccggctcgcaacatgaggtcgacaccgccgaggttccatctgcagcgtgggggtggagccggatcgatcaccgcacctggcacatcgtcggcctgtgcatcttcggcttcctgctggcgatgctgcggggcaaccacgtcggccacgtcgaggactggttcctgatcacgtttgccgcagtcgtgctgttcgtcttggcgcgcgacttgtggggccgacgacgcggctggatcagatagccagcacaccgttcg

SEQ ID NO: 1317 - DNA, 401 bp, Mycobacterium tuberculosis H37Rv
cccgccgagggcgatgagcgccagaccgatcagcaccgtggcatagggcaggtatcgctgcaccgccgtggccgcggaaatggtcagggctccgaagatgccgaacaccgtcaagaagcccagcgccatcccgaccgtggcggctgccgctcggcccactgcgctaagcggccccgtccggcccgccgaatcctgcccatacaccaccaacagcaggtaggccggcaacatggcaaacccgcatgggttcagcgcagccaccaacccggcggcgaacgccaaaccgatcagcgcctcgttcaccgggtcaggacgtcagcgcagccacccggccggacagctcgtcctgagacatggccgcggtggggttgttgacgaacgtcgatgtgccgtccgcgcga

SEQ ID NO: 1318 - DNA, 401 bp, Mycobacterium tuberculosis H37Rv
gtgaaattcaggttgtacttcgagacaaagctctgcatcgccccgacgtcggcgcgggtggcgattccgacgaaggtgaccgccggattagcggccgctacctggctgaggctgggggcttctgcgttgcagaacgggcaccacggcgtccagaaccacaacaccgccggcttgccttgcaggcttgcgccatcgaagggagcaccgctgagcgtggttgcggtgaactgcagacgttcatcggctgccaccgctcgcggtgtattggccagaccgaacatcaggacaaccgcgatagcaacggccacaatgccgtccgcaaacgccttgatcggggacaccaggcgaagactcatgacagacctcacttgttcgtgttttgacctaatgacgtaatacgc

SEQ ID NO: 1319 - DNA, 401 bp, Mycobacterium tuberculosis H37Rv
caccaggcgaagactcatgacagacctcacttgttcgtgttttgacctaatgacgtaatacgctccgtgacggttcagtacatcccggcgccccctgcgctcgcggccagctgtccgcagcgctggctgattcgcctgcgctccagctacccgcctacggcggccagctgtccgcagcgctggctgattcgcctgcgctctagctacccgcctacggcggccagctgtccgcaggcggcgctgatctcccgcccacgggtgtctcgtaccgtgcaggaaactcctttcgcccgaacccgtttgacgaattcacgctcaaccggcttggggctggcatcccaatcactgcccggagtcgggttcagcgggatcaggttcacgtgcgccaacggcccgagaac

SEQ ID NO: 1320 - DNA, 401 bp, Mycobacterium tuberculosis H37Rv
ccggcgccccctgcgctcgcggccagctgtccgcagcgctggctgattcgcctgcgctccagctacccgcctacggcggccagctgtccgcagcgctggctgattcgcctgcgctctagctacccgcctacggcggccagctgtccgcaggcggcgctgatctcccgcccacgggtgtctcgtaccgtgcaggaaactcctttcgcccgaacccgtttgacgaattcacgctcaaccggcttggggctggcatcccaatcactgcccggagtcgggttcagcgggatcaggttcacgtgcgccaacggcccgagaacacgatgcagtcgctttcccagcaagtcggcccgccacggttggtcgttgacatcacggatcagcgcgtactcaatagacacccg

SEQ ID NO: 1321 - DNA, 401 bp, Mycobacterium tuberculosis H37Rv
agcccgacctggcctccgccgaacatttccccgccgagcttgagcaacactcgcgagtacccggacagctgagccgccgacgcggcgccagtgctcgcaggctccggcttcgaagccggcgcgccggcgacatcgggctctgtcatctgactcctcgcacgacagtgccatcccggcaccaccaggacggcatctcacatcctgcctcaatagccgcgctccggcgtgggcggggtgcgttagtcacgcaacaacgaggggccggccgaggccaggcccgtcgactatctcaaggtgtgagcatcgctcgagcaacaaagttggaatagttctgttctgaaccgggtacccaggggtaccggcagacatctccgcgagggatgcctacgggccccacgacg

SEQ ID NO: 1322 - DNA, 401 bp, Mycobacterium tuberculosis H37Rv
gttgttcgccggccgggtggccggttgccttccgcgcttcacggccacccgccgggccaggcccggtcttacggtcggctccacgcttgacggcggccccaactgggccgacgacgctaggtggttcctcgtagcgtgcgaggttgatcgcggcgttgtcgtcacgttggtgcgtgatcgaacagccgtcgcattgccatttttcgtcccagccgatgtcttgcacatgccggcaggcatggcaggttttcgacgatgggaaccagcggtcggcgaccaccagactcgatccgtaccagcctgtcttgtaggacaggtgacggcgcggggttgccagggctgcatcagacagtgcgcgccgtctggcgcgcgcccccggcagtcccttttgccgcagcatt

SEQ ID NO: 1323 - DNA, 401 bp, Mycobacterium tuberculosis H37Rv
ctttaagcgcgccatcacctagcctcgtgtcccccggcgcgtgccgccgcggccacggcacgcgcagcacggttgccagcagcgcgtttgccgtagagccgcgcacatatcgacgtcaagatctcggtgatatcgcccacaacgtcgtcatcgacatcggccgaatcgaccacaaccagctcacggccgtcagcggccagtaccgcctgtacacactcaaagccgaaccgccccaaccggtcccgacgtttcatcacaatccgcctcaccgtcggatcacccagcagcgtaaggaacgtgcggcggcgcccgtacagcgccgacccgacttcagtaacgaccttgccgacgggtatctgttccgccgtggcccacgcggtcacgcctaccacttgccgatc

SEQ ID NO: 1324 - DNA, 401 bp, Mycobacterium tuberculosis H37Rv
acgcgttcagtgccgggttaacggcttcggcgcgggcgatggcggcctcgacgacgtctgcccgacccactcgacctgatcggatggcgtcggcgagggcgaccgcgtcgaggtcaccaagggcatcgtcaacgaaagcgtgtacgcgcgacatacccggctaagcctggcccacctcgaagcggacgaaccgtgtcaccgtcacgccggccacgtcgagcagggccttgacggtcttcttattgtcggacaccgacgcctgctcaagcagcaccgcatccttgaagaagccgttcagccggccctcgacaatcttgggcagcgcctgctccggcttgccctcggcccttgccgtctcctcggcgatgcggcgttcgctggccacgatgtcttcaggcacg

SEQ ID NO: 1325 - DNA, 401 bp, Mycobacterium tuberculosis H37Rv
ggcatgctgttgcggatcccggaaaggcgggccgcggtgcagacacgcgaagtcagcccgccgatgcgagctgcgccgagtagtttacaccgacccagctggtgattttcccggcagcggaatccacagcgacgacattgtccacaaaacgggcggcggcgattggccaaatcgcccgcgcggcgctgcactgcaaaggtacggagggttctgagccgcagcgtactgatcctttgctggtcgctgcttggtgcggcgccggcccatgccgacgactcccggctgggctggccgctgcggccgccgccggcggtagtccggcagttcgacgccgcatcgcccaattggaatccggggcaccgcggtgtcgacctggccgggcgccccggtcagccggttta

SEQ ID NO: 1326 - DNA, 401 bp, Mycobacterium tuberculosis H37Rv
ccgcacgtggtgccacttcgtccaggcgcgcggggcccagggcccacaacaccagcggcgagtggccgcacggccttgcccgggctccggcgccactgaaagcggcgaacgccagcaccggccactcgtcgtcgtcgggagtgatcagacgcccaccgcggcgcatgagtagctcgagatcgtctgcggcccggtctatttcgcgtcgggcaccggtgtgctgcgccagctcgttaccgacctgcccgcggcgcacccggtcggcggcctccacggggcccacacatcgcaccagcgcggccagctgggcgcacggcggttcggccacccgggacagataggcccacgcccgcgccgtcggatcgatcatcgtcgtgctccggtttgccggaagctcaggg

SEQ ID NO: 1327 - DNA, 401 bp, Mycobacterium tuberculosis H37Rv
cgatgcgccctgctgaccgcccctgggcgagccatccccgatcccccgccgacaagcgccgcaacgctggaactgtggtgcggcgccacgaacggcggccgggtaatcaacggtgtgtcccccgacagcaggccagccaccgagtggatcgcggtcacctccaacgactcgctgcccgacagcgacggcaacagccccggaagacgttgcgccagcattgttttgccgacacccggtggaccagtcagcatgaggtgatgcgccccggcggcggccacctcgacggcgaaccgtgcttgggactggcccaccacatcggcgaggtccgccgcagactcgggggtggtgtcggccgtggtgatccgcccggccaagccggtggacccgcgtagccagctctg

SEQ ID NO: 1328 - DNA, 401 bp, Mycobacterium tuberculosis H37Rv
ccatcacgcggtcccggctgaccttggcgagcacgctagccgcggcgatgcaggcggctgccgcgtcgccaccgatcaccggcaacgacggcatcggcagtcctggcacgcgaaagccgtcgctgagcacataaccgggccgcaccgccagaccggccaccgcgcgccgcataccttcgatattggccacgtgcacgccgcggcggtcgacctcggccgacgggatgaacaccacgtgataggccaccgcataccggcagatcagcgggaacagcttctcccgcgcttgctcgctgagcttcttcgaatcatcaagggcggcaagacttgctatccgcccggggccaagcacgcaggccgcgaccaccaacgggccagcgcaggcgccgcgacccacttcg

SEQ ID NO: 1329 - DNA, 401 bp, Mycobacterium tuberculosis H37Rv
agggtgcgcattccccgcaaacccccagatttacggatcaccgtccgcggtggccaggtcttggtcatattccagccatggctaccgaccttgctggggattcaccgaacgcacaacaccccaacgcgacggcggccacacgatcaacctggccttaccgatgacgttggccaccggcacggtccccggtagcggatcgtcagtacatagcaacgggcagtgagcgcgggaatccgccgaatgggtgcggttgtcgcccatcacccagacacgcccgggcgggacggtgaccggcccgaactcgctgcccaggcacgggtatatcgacgggtcggccatcatggtggccggatccaggtatggctccttcagtggcctgccgttgaccgtcaggccggtgt

SEQ ID NO: 1330 - DNA, 401 bp, Mycobacterium tuberculosis H37Rv
gcggggttgacgtcacgatgcagcaggccgcgctggtgggcgtagtcgagagctccggctacggcagtgacgatggcgagtacctcaccaaccggcaagaccgccggaaaccggtcggccatatgctgcgtggcgtcgatgccatcgacgtagtccatcgcaatccacagctgcccgtcgaactcaccgcgatcatgaacctccaggatgtgcgggtgaaatagccgcgcggcaacctcggtctcccgttgaaatcggcggcgaaattcgtcgtccgcagccatcgccggcgaaagcaccttcagcgcctgccagccggggaatccgggatgttgcacgaggtagacctcacccatcgcggaacaacccagcatccgcacgacggtgtagccggcaaaggt

SEQ ID NO: 1331 - DNA, 401 bp, Mycobacterium tuberculosis H37Rv
tgacgccttccaatcgctccacaccccggggccggtggccttcgagtccgcctccgacagggcgtgcaaaacttcgagcagttgcggatccccacccagcgcctcggacaccgcctcgatggttttggggtcgtttaagtcacgtcgggttgccgtaatcggcagcagcaggtggtggcggaccagcttggagagcgtccgcacgtccggcggcgacaaccccagcctggtgcaaaccgggattaccaattcggccccgagcacactgtgatcggtgccccgtcccttgccgatgtcgtgcagcagcgcgccaagcgcaagcaggtcgggacgtgccacccgggtggccagtggcgccgcatgcaccgcggtctcgaccacgtgtcggtcaaccgtccact

SEQ ID NO: 1332 - DNA, 401 bp, Mycobacterium tuberculosis H37Rv
cttcggcgtggtaaccgatggtgcggccagcactcgacagtgtgcgcgccaaatcgaatcggtcaccgaaacccaacgcggcgctgatctcgtcggcgaactgggccagcaggtggtcgcgtccgcggcccgacacccggtgcagttcggtgcgcacatccagcaaggtgcgatacgcaccgtccagcgaacccgccggcaggtccgtgtggccgataccgtgccggtcgatgagctgggcgagagccagcgcgtctagcaactggacgtcccgaaggccgccgcgacccaatttgagatcgggctctgcgcgctgcgcgatccggccacagcgccgccaacgcgcatatgtcatttcgacgagttcgcccatgcgggaacgaattccgttgcgccactgg

SEQ ID NO: 1333 - DNA, 401 bp, Mycobacterium tuberculosis H37Rv
ggactttctgcctccatctccctcgctagcgctaattggtgcggccgggttggttcagcacagtgcggctagtttcataacgcgtcgtgtccgcgttcaccggtgcgcacccgcacgatggtgtctaccggactcacccacaccttgccgtcgccgatcttgccggtgcgcgccgcccggacaatgctgtccacgaccttgtcgacaatggaatcgtcaacaacgacctcgatccgaaccttcggtacgaaatccaccgagtattcggccccgcggtaaacctccgtgtggcccttctgccgtccgtatccctggatttcactgaccgtcatccccagcactcccgcgtcctcgaggctcgtcttgacgtcgtcgagcgtgaacggcttcacgatcgcagt

SEQ ID NO: 1334 - DNA, 401 bp, Mycobacterium tuberculosis H37Rv
ctgggtctcaagttgtatgacgtcgtcgagagtctgtgtgcgcacggcttcctgttccgtacgctgctgcagcaaccggttccactcttcttccgccgcgcgggcctcctgcccgaggcggcccagctgctcgtacatcgccgagatggccgtgtcggattcgttaagcgcggccaaggcttgctcggccgcgtcctggcgggcggactgctcggtcagcgcaccggccagggccgcattcaattgcgccgccagcgcctcggcagcggccagctcactcctggccttgtcgatctcggaggtgacctccaaggtggacagcttgcggtccgatccgccgctgacccagccggcgcccaccagatcaccgtcaacggtgaccgcgcgtagctccggacgaa

SEQ ID NO: 1335 - DNA, 401 bp, Mycobacterium tuberculosis H37Rv
gggtctgctgggcgcgcattgcggcatcctcgatccgctcggacaaccgtgccacgctctcatcgatcgattcgacacgcgcccgcatggtctccacctggccagccagccgcgccagtccctcacggcggtccgcctcctcccggaccgccgccaggtgtgcccggtcggcctcggcggcgcggcgctcccggtcggccagctctgcacgggcagcatcgagtcgggcacgcgccgcgtccagctccgctaacagttgttgctcggcgacggccacctgctgggcctcggcttctagctcctcgggctttctggggtcggtgtcgctgaccgctaccggctcgatatcgagatgatgggcgcgttcgctggcgatgcgcaccgtagcgtccacccgttcg

SEQ ID NO: 1336 - DNA, 401 bp, Mycobacterium tuberculosis H37Rv
gcccccgcccggtatgcaccatctcgggtgcagccgaggcgtgttgttaatctcgtcacaacgggacgccggtcacaagacgtgcgacccagccgccggcggcactctgacctcggttcttacctgactaccaattcgtcaccggcatcgcacacgtcacaccaaccacagcggacgcggcacggcacgcggaagggacgttagactcggctagcaccaccaccgtgcccaggcaacgacgccggccgtcgctaagaaatttggttgacttcatgaataaggccgcgcccgccccgacaaatgattaccttacatttgcgggctaggcatagcggagcaggggttttagtctagggggagatcggctggcgctgcgcagacatgctgcggaagcagaactg

SEQ ID NO: 1337 - DNA, 401 bp, Mycobacterium tuberculosis H37Rv
cgtccggatcgacgcgtacgccggccggagtcattgtgtcgcacacgaatgtcattgccaatgtgacacaaagtatgtacggctatttcggcgatcccgcaaagattccgaccgggactgtggtgtcgtggctgcctttgtatcacgatatgggcctgattctcggaatttgcgcaccgctggtggcccgacgccgcgcgatgttgatgagcccaatgtcatttttgcgccgtccggcccgctggatgcaactgcttgccaccagcggccggtgcttttctgcggcaccgaatttcgccttcgagctggccgtgcgcagaacatctgaccaggacatggcggggctcgacctgcgcgacgtggtcggcatcgtcagtggcagtgagcgaatccatgtggca

SEQ ID NO: 1338 - DNA, 401 bp, Mycobacterium tuberculosis H37Rv
tttgttgttgtccccggcggtatttcgcggtttcgaccaagtcggcgccttgtccccgacaggtcagtgccgtgcgttcgatgcgaccgccgacgggtttgtccgcggcgagggtgccggggtagtggtgctcaagcggttgaccgatgcacagcgcgacggggatcgggtgcttgcggtgatctgcggttctgcggtcaaccaggacggccgatccaacgggctgatggcccccaacccagcggcccagatggcggtgctgcgtgccgcctacaccaacgcggggatgcagcccagcgaggtcgactacgtcgaagcgcacggaacagggacgctgttgggcgacccgatcgaagcccgcgctctcggaacggtgctgggtcgcggccggcccgaggatt

SEQ ID NO: 1339 - DNA, 401 bp, Mycobacterium tuberculosis H37Rv
gggccgtcaattgttggccgacgagccggctttcgcggccgcggtcgccgaattggaaccggtgtttgtcgagcaagccggcttttcgttgcacgacgtgctggctaacggcgaggaactggtcggtatcgagcagattcagctcgggttgatcgggatgcagctggccctgaccgaattatggtgttcctacggggtgcggcccgacctggtgatcggccactccatgggcgaggtggccgccgccgtggtcgccggggcactgaccccggccgagggtctgcgggtgaccgccacccggtcacggctgatggcaccgttgtccggccagggcggcatggcactgctggaactcgacgcgcccactaccgaggcgttgattgccgacttcccacaggtga

SEQ ID NO: 1340 - DNA, 401 bp, Mycobacterium tuberculosis H37Rv
ccggggaaaccggtcacgttgaatgccgacgccagccagctcgtcatcggtgcgaccggcaacatcggaccgcatctcatccgacagctcgcgcggatgggggctaagacaatcgtcgcgatggctcgcaagcccggcgcgctcgacgagttgacccaatgtctcgctgcgaccggaacagatctcatcgcggtggccgccgatgcgaccgatcccgccgccatgcaaaccctgttcgaccgattcggcacggagctaccgccactggagggaatctatctggcggcctttgcgggccgcccagcgctgctgagcgagatgaccgacgacgacgtgaccaccatgtttcgtcccaagttggacgccttggcgttgttgcaccgacggtcactgaagagccc

SEQ ID NO: 1341 - DNA, 401 bp, Mycobacterium tuberculosis H37Rv
catcgcggtggccgccgatgcgaccgatcccgccgccatgcaaaccctgttcgaccgattcggcacggagctaccgccactggagggaatctatctggcggcctttgcgggccgcccagcgctgctgagcgagatgaccgacgacgacgtgaccaccatgtttcgtcccaagttggacgccttggcgttgttgcaccgacggtcactgaagagcccagtgcgccacttcgttttgttctcttcggtgtcaggtctgctgggttctcgatggctcgcccattacaccgcgaccagcgccttcctggacagcttcgccggcgcgcgtcgcaccatgggcctgccggccaccgtcgtcgactggggactgtggaagtcgctggccgatgtgcaaaaagacgcga

SEQ ID NO: 1342 - DNA, 401 bp, Mycobacterium tuberculosis H37Rv
gcgctagccaagagcgcgtccttctccgtggtcgacctcgacctgaatctcaagctgcagccggcgcgctaccgccaactcctgcaacacatcctgcagcacgtggcggatggcaaactcgaggtacttcccgtcaccgcatttagcctgcacgatgcggccgacgcattccggcttatggcatccggtaaacacaccggcaagatcgtcatctcgataccccagcacggcagcatcgaggcgatcgctgccccgccaccacttcctctggtcagccgcgacggcggctacctcatcgtcggcggtatgggtggtctcggattcgtcgtcgcgcgctggctggctgagcaaggtgcgggactgattgtcctcaacggacgctcggcccccagcgacgaggt

SEQ ID NO: 1343 - DNA, 401 bp, Mycobacterium tuberculosis H37Rv
ctggccgacggtgtggacacaatcgagcaggtgccgcctgatcggtgggatgcggacgcgttctacgatcccgatccttcggcgtcgggtcggatgacgacgaaatggggtggtttcgtttccgatgtcgacgcgttcgacgccgactttttcggaatcactcctcgggaagccgtggcgatggacccgcagcatcggatgctgctcgaggttgcctgggaagcgttggagcacgcgggtattccgccggattccttgagcggcactcgaaccggcgtgatgatgggtctgtcgtcgtgggactacacgatcgtcaatatcgagcgcagagccgacatcgacgcgtacctgagcaccggaaccccgcactgtgccgcggtggggcggatcgcgtatctgtt

SEQ ID NO: 1344 - DNA, 401 bp, Mycobacterium tuberculosis H37Rv
cgtgcggtacccctgccactagagcagaagatcttcgatgccgaatggaccgaaagcccgatcgcagccgtgccggctccggagccagctgccgagacgacgcggggaagttggctggtactcgccgatgcaacggtggatgcgccaggcaaggcccaggccaagtcgatggccgacgacttcgtgcagcagtggcgctcaccgatgcggcgggtgcacaccgccgatatccacgacgaatcggcggtgctggccgcatttgcagaaacggcaggcgatcccgagcacccgccggttggcgtggtggtgttcgtcggcggtgcctcgagtcgactggacgacgagctggcggcggcgcgcgacacggtgtggtcgatcaccacggtggttcgtgcggtcgt

SEQ ID NO: 1345 - DNA, 401 bp, Mycobacterium tuberculosis H37Rv
ggcggatttcggcgtggaaccgccggtagcgctgatactgcaaggcgcgtccttgcatgacctgacggcggacttaatgcgccaactcgggctcaatgatcccgatccggcgctcaacaacgctgacactattcgcgaccgggcgcgccagcgcgcggcagcgcgacacggagccgcgatgcggcgccgacctaaacctgaagtacagggaggataagacctgtgagcatccccgagaacgcgatcgcggtggtcggcatggccggccgatttccgggcgccaaggatgtttcggcgttctggagcaaccttcggcgcggtaaggagtcgatcgtcaccctgtccgaacaggagctgcgcgacgccggcgtcagcgacaagacgctggccgatccggcgta

SEQ ID NO: 1346 - DNA, 401 bp, Mycobacterium tuberculosis H37Rv
gcgacaccggccgctgtcgtgtcccgctgatcctgcgcctggatcccaagatcgggctaccggatattcgagcggtgctgaccgcagtggtcaaccaccacgacgcattgcgcctgcacctggtcggcaacgatgggatatgggagcagcacatcgcggcacccgcagaattcaccgggctttccaaccggtcggtgcccaacggcgtggctgcaggcagccccgaggaacgggccgcggtcttgggcatcctggccgaactccttgaggatcaaacggatccgaacgcgccgctggctgccgttcatatcgccgccgcgcacggcggtccgcactatctgtgccttgccatacatgcgatggtcaccgacgactcatcgcgccagatcctggcgaccgac

SEQ ID NO: 1347 - DNA, 401 bp, Mycobacterium tuberculosis H37Rv
atctgaaggatctggacgctatcgtcgcggcgctcggttcgctgttgcccgagcaccacagggcgatgctgacgcccgactcagaccgcattacgatgccggcgcctgacggcatacgtatgctcgtcgaggcagcgcgccggatcgacgaggcgaggatcgagctagccgatattgcgctgcgccgaccgtcactcgatcacgtattcctggccatgacgaccgatcccaccgagtctctgacccatctggtgtcggggtccgcgcgatgagcggcccggccatagatgcgagccccgccctgaccttcaaccagtcaagcgcgagcattcagcagcgacgcttatcgaccgggcgacagatgtgggtgctctatcggcgtttcgccgcgccgagcctac

SEQ ID NO: 1348 - DNA, 401 bp, Mycobacterium tuberculosis H37Rv
ctagtttgcggctacgtcatcggattccgttttcatcgcggggccctctatatcgtcggtttttgcctactggttatcgcgatcggggctgtgctgtcattcgccgctgacctggttggcaccgttaccaggaacccagacgcgatgctgccgctgctgagcttgcccattttgatcttcggactgctgtccattggtctcatgccgttaaagctgtttccgcactggatccatccatttgttcgcaaccagccgatctcccagttcgtcgcggcgctgcgggcattggccggagataccaccaagacagcctcacaggtgagttggcctgtgatggctccgacgttgacgtggttgttcgctttcgtggtgatcctggcgctttcatccaccattgtttt

SEQ ID NO: 1349 - DNA, 401 bp, Mycobacterium tuberculosis H37Rv
cgtctccgtgcggccgtcctgattggtggccgtgccacgcaccacggcgaagatccgattaccgtcgcgcagcgcatccggcagtcgcttcagcaacaccatcgcgcagccctcggaacgcacaaacccatccgcgtcagcatcgaatgaatggcaccgaccggttgacgacagcatgccctgcgcagacgccgccacactggcatgcggctccagcagcaccgcacaaccgcccgccaaagcgaggtcagcttcgccgtcatgcaggctgcggcaggccaggtgcaccgccatcagacccgaagaacacgcggtgtcaaacgtcatcgccggaccatgtagacccaatgtgtgcgcgatccgccctgacgccacactgttgttgaggccggtaaccacat

SEQ ID NO: 1350 - DNA, 401 bp, Mycobacterium tuberculosis H37Rv
gccttaattgcgttagccggcgacccgccgcgggggcggcgccacatcacatccgaccgtgtccgatggtggacccatggcgagccggcaaacccctgctgagctggccagatgcgacttggctaagaccgcggagcgcgagcacaccccgacggcgactgcgacaactccaagcgtggccggtaacgtgatgcccatgagtgtgcgttcccttcccgctgcgttgcgcgcgtgtgcgcgtctgcaaccccatgacccggccttcacgtttatggattacgaacaggactgggacggcgttgcgataaccctgacgtggtcgcagctgtatcggcgaacgctgaatgtggcacaggagctgagccgttgtggttccacgggtgaccgcgtggtgatctctg

SEQ ID NO: 1351 - DNA, 401 bp, Mycobacterium tuberculosis H37Rv
ggcgactgcgacaactccaagcgtggccggtaacgtgatgcccatgagtgtgcgttcccttcccgctgcgttgcgcgcgtgtgcgcgtctgcaaccccatgacccggccttcacgtttatggattacgaacaggactgggacggcgttgcgataaccctgacgtggtcgcagctgtatcggcgaacgctgaatgtggcacaggagctgagccgttgtggttccacgggtgaccgcgtggtgatctctgctccgcagggactcgagtacgtcgtcgcctttctcggcgcgttgcaggccgggcgcatcgccgtgccgctttcggttccacaaggcggcgttaccgatgaacgttccgattcggtactgagtgattcgtcgccggtggccattctcactacat

SEQ ID NO: 1352 - DNA, 401 bp, Mycobacterium tuberculosis H37Rv
gacccggccttcacgtttatggattacgaacaggactgggacggcgttgcgataaccctgacgtggtcgcagctgtatcggcgaacgctgaatgtggcacaggagctgagccgttgtggttccacgggtgaccgcgtggtgatctctgctccgcagggactcgagtacgtcgtcgcctttctcggcgcgttgcaggccgggcgcatcgccgtgccgctttcggttccacaaggcggcgttaccgatgaacgttccgattcggtactgagtgattcgtcgccggtggccattctcactacatcgtctgccgtggacgacgtcgtgcaacatgttgcgcggcggcccggggaatccccgccatcaattatcgaagttgatttgctcgatctggacgctccgaa

SEQ ID NO: 1353 - DNA, 401 bp, Mycobacterium tuberculosis H37Rv
ctgacgatcggaaccatcaccgcagccaccatgctggccgcgcggctcgggtccgacgcaggtcattcggccgcgcccacataccgcgacagcctgcccgcgttcgccctgcccggggcgtgtgtcgccatattcaccggcccgctgctgctggcccgaaccccagcgctgcacggagttggcactgccgggctaggtgtctttgtggcacttgcggcttcgttgacggtgctgcctgccctgatcgcgcttgccggagcgtcacggcagttaccggcaccaaccacgggtgccggctggacaggccggttgtcgctacccgtctcttctgcttcggccctgggcacagcggcagtgctggcgatctgcatgctacccatcatcgggatgcggtggggtgt

SEQ ID NO: 1354 - DNA, 401 bp, Mycobacterium tuberculosis H37Rv
gatgtggtggtgatcaaatccgctcgggacctgagggacccagccgcgctcatcgccatcaaccaggtcagccaccgtctggtggaggttcccggtgtgcgcaaggtggagtcggcggcatggccggccggtgtcccgtggaccgacgcctcgctcagttccgcggccggcaggctcgccgaccagctgggtcagcaggccggatcgttcgtgccggcggtgactgcgatcaaatcgatgaagtccataatcgaacagatgagcggcgcggtcgaccaactggacagcaccgtgaacgtgactctcgccggggcaaggcaagcacagcaatacctcgatcccatgctcgccgccgcgcggaacctcaaaaacaaaaccaccgaactgtcggaatacctgga

SEQ ID NO: 1355 - DNA, 401 bp, Mycobacterium tuberculosis H37Rv
tgcggctcatgcgggccagatctcggctgctcaaatgcgcggtcatgccgccaggctgttcccacaaaccccacgccagtgatatcccggccaaccctgcggcctgccggtgagcggccaacccgtccagaaacgcgtttgccgccgagtagttgccctgccccggcgagccgaccgtggccgcgatcgatgagcacagcgcaaacatcgacaaatccaggtcactggtggcctggtgcaggttccacgccgcgtccaccttggcccgcaacaccgtatcgatgcggtccggtgtcaacgaggtgatcactgcgtcatcgagcacgccggcggcatgaatcaccccgcgcaccggcgggtactcccgcgacagctgggcaaacaaccccgctaccgcagcg

SEQ ID NO: 1356 - DNA, 401 bp, Mycobacterium tuberculosis H37Rv
cctggtgcaggttccacgccgcgtccaccttggcccgcaacaccgtatcgatgcggtccggtgtcaacgaggtgatcactgcgtcatcgagcacgccggcggcatgaatcaccccgcgcaccggcgggtactcccgcgacagctgggcaaacaaccccgctaccgcagcgcgatcggccacgtcacaggccaccacctgcaccttggcgccggcctccgtcaagtcggcggccaattcggccgctccctccgcgcgatcgccccgccgactggccaacaccagatgacgcaccccataggcgccaaccaggtggcgggccaacaccccaccaaccgccccggtggcaccggtgatcaccaccgtgccgtcggcaagccggtcggccaacgccgagggcatg

SEQ ID NO: 1357 - DNA, 401 bp, Mycobacterium tuberculosis H37Rv
gccgtcaagaacaccaccggcacagcggctgcctgagcaaacgaccagccttgcggcacccgggtaaccagttgctgatccaccaccgccagcggaccggccccgcccaggaatcccatcacggcgtcaccgacggcaagatcggtcacttcgggaccggtctcaagcaccaccccggcgccttcggcacccagcggtggggcctggccgggatacatccctagggcggccaccacatcgcggaagttgaccccgacggccgccaccgccacgcgcacctgccccgcctgtagcggtgcctgtacctccgggcagggctggatcaccaaatcctccagggtcccgccaccaccggcggccaatcgccacgccgactctgccgccggtaacgctagcaacgc

SEQ ID NO: 1358 - DNA, 401 bp, Mycobacterium tuberculosis H37Rv
cctggcctcggtcaacaccgacaccgcgccgctggtccaatccacccgcggggaaggctcatccacatgcaacgtcgccggcatcaccccatgacgcatcgcctgcaccatcttgatcaccccggcgacccccgcggcggcctgggtgtggcccatgttcgacttgattgagcccacccacagcggctgctccgctggacctccctgcccgtaggtggacagcaatgcctgcgcttcgatgggatcacccaacgtggtggcggtcccgtgtgcctccaccacgtctacgtctgcggcggacaacccggcgttggccaacgccacctggatcactcgctgctgggcgagcccattgggcgcggtcagcccattggacgcaccatcctggttgaccgcgctcc

SEQ ID NO: 1359 - DNA, 401 bp, Mycobacterium tuberculosis H37Rv; identical to SEQ ID NO: 1358

SEQ ID NO: 1360 - DNA, 401 bp, Mycobacterium tuberculosis H37Rv
gagcagacggctgcgctgccgctttcatacgaatccgagtcggcgcatagcgtctgtaccttgcccgggctcgcgacgcgattcgttaaggtctcacgaccatagcaggtacgggccacacccgagggcctaatgggattgacggaatcgtcagccgcggcgtcagcgctggctgcagccccattcgcgaaacacaccgtcgggctggcttcgctaagcctaatgagcaccgtcttcgatgtcgacctgctgatcgtgccggagcgaattcgccagcgccgtgcgattcgttcgatccggtcgcgacgggtggcacccgcagagcgctgtcagaccccacaggtcacagttcagagaccgcaaccgactgatcccgccggtacaccgtgcccccaccaaca

SEQ ID NO: 1361 - DNA, 401 bp, Mycobacterium tuberculosis H37Rv
gggtgacctggaggccgcgccaataccagggggccagccgccaccgatgggggggcaagccaaacggccgccagcgttgcaggcttcgaacgaggcggtttggcatggcgcactctaacatccggatcgcccgcatccggtaggtcggccgttgagctccgaggttctcgaaacaaccagtggtgcccagatccaaagggcgccaacgccgctggcccttcgccggcccaagccgtctgcacactaccacccgcatcaggcgcacatcttggaactgcaccaggtccaatcgtcagcagcgcctggcgttgtgaccgaacctcgggtccgcagacccactgcaatgttgcgcgacccaaactatcccccggggcggagtatttagcgtgttagtgttgcac

SEQ ID NO: 1362 - DNA, 401 bp, Mycobacterium tuberculosis H37Rv
ctatccggaccgtttacgatcttggaaagcaaagcgtcaacggatccactttgggattgccggcagcatgcgttgggcgattctgatggaacggttacgatcaatatcgcaggaaacgccggtcagagcagttccgtcttgcccatgctgaaaagtcatcagaacgcttttcccccggcaaactatgtcggtacccaagaggcgtccatacatcgacttgattccgtggcgccagaatttctaggcatgaacggtgtcgcttttctcaaggtcgacgttcaaggctttgaaaagcaggtgctcgccgggggcaaatcaaccatagatgaccattgcgtcggcatgcaactcgaactgtccttcctgccgttgtacgaaggtggcatgctcattcctgaagc

SEQ ID NO: 1363 - DNA, 401 bp, Mycobacterium tuberculosis H37Rv
ggtgctcgccgggggcaaatcaaccatagatgaccattgcgtcggcatgcaactcgaactgtccttcctgccgttgtacgaaggtggcatgctcattcctgaagccctcgatctcgtgtattccttgggcttcacgttgacgggattgctgccttgtttcattgatgcaaataatggtcgaatgttgcaggccgacggcatctttttccgcgaggacgattgattggaatcgcttcgcgaggcccggcaccagaccgggcaccagaggtccgcgcagatcgcctgggtcgaagatggtgcagacgaaacgatacgccggcttgaccgcagctaacacaaagaaagtcgccatggccgcaccaatgttttcgatcatcatccccaccttgaacgtggctgcg

SEQ ID NO: 1364 - DNA, 401 bp, Mycobacterium tuberculosis H37Rv
ggacatccgttggctagccggcgatatcgtgggcaccctttagcagacgagccgcagcgcactttcgatgtgctgcgggaatccggcaaagtctggtccgaaggcttcggcaagccgccgggcggcttgtcggaactcggccccactgagcacctgctttacggctgccgccacgccttcagtgttgagccgctcggttcgcaggagaacgccggcgccggcccgctcaagggcctccatgttcaagtgctggtccatgttgctggggagcccgatcaccggcaccccggccgccaacgcctgctgcgtcgtcgggctgccgccgttgcagagcaccacggcggagcgcgctgcagccgcttcgcccggcaggtagtccgcgacgaaggcgttggccggca

SEQ ID NO: 1365 - DNA, 401 bp, Mycobacterium tuberculosis H37Rv
aagtgctggtccatgttgctggggagcccgatcaccggcaccccggccgccaacgcctgctgcgtcgtcgggctgccgccgttgcagagcaccacggcggagcgcgctgcagccgcttcgcccggcaggtagtccgcgacgaaggcgttggccggcacgttcttcaggtggttccggccagcggtggccgcgatcaccgtgacgggtaaatcggccagggcgttcaaaaccacctgcaacaggttctttccgccggaactgccgagggtcgcataaataatcggccggtctgtcggcagcgagtgccaccaagtcggcggttttacgtcgggcgaccacaggacgggtccgagatatcgatggttggccggcaggttgtatgtcggcaccagctcgggtac

SEQ ID NO: 1366 - DNA, 401 bp, Mycobacterium tuberculosis H37Rv
atctgcctcatgatgttggcaaaatacaccgccgagccgccgtagcgggtgccgaactcgatgacgagggatggttgcaactcgctcaggatctcctggtaattccacatatcgctgacggatttccagcaattgatccccatataagtggtcttcgtccacactaagttgccgtagtaccacttgtggtattcttccgccactgcgtcgctcggccggtagaataactgggccgcaaaactcgccactaacctgactagtccgatcagttgccctacaagactagtccgactgcgccacactagccccattccatcatctcctcactgcgaaaccgtagtcagtcgaatgttggtcatttagcaagcctctttaagagaactgatgaggtcgaagcggac

SEQ ID NO: 1367 - DNA, 401 bp, Mycobacterium tuberculosis H37Rv
ggcaactcagccaacgcgttcaacaccagttgcaacagatttctcccgccggacgtgcccagggttgcgtacacgatcggccggtcggttggcagcgaatcccaccatgtcggcggcttcccggcgggcgaccacaggaccgggccaaggtactcgtggttggccggcaagtcgtaggtgggcatcagctcgggcacgtcagcatacagggtgtggtccccgtcggtgaaaatgcggcacaggttccaccccagactcgacagcccgtgcctgcggcggacccagttgagcggcatgcactgcagggcgaagagcaaagggcgttccaggcggtagaggagcttgaccaacctgacgccgaacaagcgggtccatatcacgtcgggcagcggaaaacgccg

SEQ ID NO: 1368 - DNA, 401 bp, Mycobacterium tuberculosis H37Rv
ccaaatcgcgctggatcggaggcgaattcgtctgcactgacaccggcgccgaccagtgccagcgccagatcgccgaccaccttggacgttggcgtgaccttaaccagcctgcccaacactcggtcggcgcccgcgtaggcctcttcgatctcttcgaatcgatctcccagaccaagagcaattgcttgctggcgcagattggacagttggccgcccggaatctcgtggtgataaacccgccccgtcggccccggcaacccagactcgaacggcgcatacacttttcgtaacgcctcccagtacggctccagggcgcacaccgccgaaagcgacaggccggtgtcgtactcggtgtgggcagcggcagcaacgatcgagctcagcgcgggctggctggtcgt

SEQ ID NO: 1369 - DNA, 401 bp, Mycobacterium tuberculosis H37Rv
cccccgaccagggtttcacccgttcccaggaagcatgtagagccagtttggaccgcctcggcctcgactacgtcgacctttacctaattcactggccggccccgccggtgggcaagtatgtggacgcctggggaggcatgattcaatcccgcggagagggccatgcccgatcgatcggcgtgtccaacttcaccgcggagaacatcgaaaaccttatcgacctcacattcgtcacgccggcggtcaaccagatcgagctgcacccgctgctcaaccaggacgaactgcgcaaagctaacgcccagcacaccgtcgtcacacagtcctactgccccctggcactcggcaggctgctggacaacccaaccgtcacatcaatcgccagcgaatacgtcaagacg

SEQ ID NO: 1370 - DNA, 401 bp, Mycobacterium tuberculosis H37Rv
tcggtcgggtccagcgtgaaccgaaacgcttggaccgtccagccatcgggaacctcgaacttgggcatcaggcggcctcatggtcctcgccagcagcggccgccaatgcgcgcttggttcgattctcggcagcccgtttgccatacagacgggcgcacatcgacgtcaggatctcggtcatatcccgcaccaggtcgtcatcgacctcggcagagtcgactaccaccagttcgcggccctgcgccgcaaacgctgcctgcacgtacttcgagcccaaccggcagaaccgatcccggtgctccaccacgatccggtggactgacgggtcgcgcagcagtgaaaggaacttacggcggtgctcgttgaacgcggaaccgacctcggtcacgaccttgtcgact

SEQ ID NO: 1371 - DNA, 401 bp, Mycobacterium tuberculosis H37Rv
gactaccaccagttcgcggccctgcgccgcaaacgctgcctgcacgtacttcgagcccaaccggcagaaccgatcccggtgctccaccacgatccggtggactgacgggtcgcgcagcagtgaaaggaacttacggcggtgctcgttgaacgcggaaccgacctcggtcacgaccttgtcgactggcatctgttgggccgtggcccacgcggtcacccgcgcgacctgccgatccagatcggctttctgatcggccgacgacacccgtgcatacaccgcggtcggtgatcgcatgccagcgtccccagccggttcgtcgacgagaatcagtcggcccactcgcctcgccatcaccgacaacagaccagcacgaaaccagcggtaggcggtccccggagcaa

SEQ ID NO: 1372 - DNA, 401 bp, Mycobacterium tuberculosis H37Rv
gggccgtggcccacgcggtcacccgcgcgacctgccgatccagatcggctttctgatcggccgacgacacccgtgcatacaccgcggtcggtgatcgcatgccagcgtccccagccggttcgtcgacgagaatcagtcggcccactcgcctcgccatcaccgacaacagaccagcacgaaaccagcggtaggcggtccccggagcaacaccgttgcgctccgcccacgtcgccaggttcatatctctgttcctaccgcacgccactgacaactaccgaccactcaacccgcaacagctggcaccccccgatgcgtcgtcgcccacgccgcctccttcggcccgttctggccctgtggaccttcgaacacctcgcccgacctgcggtaagttgagtcactgc

SEQ ID NO: 1373 - DNA, 401 bp, Mycobacterium tuberculosis H37Rv
cgccattgcgcgcccgcgtcggtgaagatctcaccgagcccttcggcctcggcctgcgcgcgtacccgcattgagcccggaacgatcagcatccgcacgccgtcggccaccttgcggccacgcagcacttcggcgaccacccgcagatcttcaatgcgaccgttggtacacgacccgacgaacacggcgtcgaccgcgatgtcgcgcatcgcggttccgggtcgaaggtccatgtacgccaatgctttctcggcggcctgccgctcggcgtcgtcggtcatcagttgcggatctggcaccgcggccgccagcggtaccccttggcctgggttggtgccccaggtgacaaacgggctcaacgacgcggcgtcgagatacacctcggtgtcgaaaacggcgcc

SEQ ID NO: 1374 - DNA, 401 bp, Mycobacterium tuberculosis H37Rv
cgaccgcgatcacatagtcattgccgtgccacagaccgtcttgccgctcgttgagctgcaatgcccgagcgcgcagttcttccacataggcacgcattgccatgccaagcccgttggaggagaatcgctcgattcgggccaagcacatgttgagttggccgttcacgtagcgagctcggtagcggatggggaagcggcgcgcttcaagaatgcgaaagcccgcaaggcccagtcgccccagcatccagtccagcgggaactctcggtacggtcgttcgccggcaagcaacaggcaggcgtcgcgcacgcgaccgatttcccagatgattttgccactttcggtttccggctcgaattgcacgtagggctccaagccgactaggtaaagacgaccatgatcg

SEQ ID NO: 1375 - DNA, 401 bp, Mycobacterium tuberculosis H37Rv
gaacgctggccaccatcggacccgacggccagccgcacttgacggcgatgtggtatgccgtgatcgacggcgaaatctggctggagaccaaggccaagtcgcagaaggccgtcaacctccgacgggatccgcgggtgagcttcctgcttgaagacggcgacacctacgacacgctgcgcggcgtgtcgttcgagggcgttgccgagatcgtcgaggagcccgaggcgctgcaccgcgtcggggtcagcgtgtgggaacgctacaccggcccctacaccgacgagtgcaaaccgatggtcgaccagatgatgaacaagcgggtcggtgtgcgcatcgtggcccgtcggacccgctcgtgggatcaccgcaagctggggctgccacacatgtcggtgggtggc

SEQ ID NO: 1376 - DNA, 401 bp, Mycobacterium tuberculosis H37Rv
caagccgataccgccacataccgccgcggccagatcggtgatgatgtcgccgaacaggttgtcggtgacgatcacgtcgaagcgacccgggtcggtgatcatgtggatggtggcggcgtcgacgtgctggtaggccacctcgacgtccgggtagcattcgccgacctcgtcgacggtccgcaaccacaatcccccggcgaaggtcaacacgttcgttttgtgcaccaatgtcagatgcttgcgacgccgtcgagcccgctcgaacgcgtcggcaaccacacgccgcacaccgaacgcggtgttcacgctgacttcggtggccacctcgttgggcgtgccgacgcgaatcgccccgccgttgccggtgtagggtccctcggtgccctcgcgcaccaccacga

SEQ ID NO: 1377 - DNA, 401 bp, Mycobacterium tuberculosis H37Rv
gcagcgcggccgacttcgaatttcccgaagttttacacgacgtgtgctccgcggtgcatccgcttgctttggcgtcgccgtttttcgccgaattcgacctacccgcgcgcggagtgacgctgaccgtgcccgacatcgcctacgccaacccgctacccgggcggcccgcggcgatcgcctatcacgatctggcgcacacctgcgccaagctggacgacggcgcgtcctggcggcgcctgctgggcccgttggtggcgcactcggagacggtcgtggagttcatgctctccgacaagcggtctttgcctactgcactgggctcggtcctgcgtctcgggctgcggatgctggcccagggcacccctgcctggcggtcgctggcgggcgaggatgcccgcgcg

SEQ ID NO: 1378 - DNA, 401 bp, Mycobacterium tuberculosis H37Rv
gacatcacggtcggcgccaactcgacctggcgcgcgatcgccggccccaccccgcggttgaatccctggcgcacaccgattcccaaggtgtacctgtgttctgcggcgactccgcccggcgccggcgtgcacggcatgtgcggctggtatgccgctcgaacgctgttgcgcaccgagttcggcatcacccgcatgccccctttgggccatgagctgaggccataacgaagcttgcgatcatcgactattcggaggcgcgccaggcggcagcggcgacaaccggaacgtcggcacggtgctcaatcacgggtgcacggtgtgcatcagaatggcgggggttcgttgtcgcggtgaggcgttcggcgaggaggtagtgtctaccccttgcccgcgggttcgtg

SEQ ID NO: 1379 - DNA, 401 bp, Mycobacterium tuberculosis H37Rv
gcgagtggccgacggcgacatccccaaggacatcctgaccggcatccccaaaggtgctgccggtaacaccggggcgctgatcttcaccagtcccaccacgctggtcgtgatgaccggggatgctggcgacccggcgttggccgccgatccccaatcgttggccggtaaggtcctgcgtatcgaacagcccaccaccatcggccagacgccgccgacgacggcgctgtctggcatcggctccggcggcggcttgtgcatcgatccggtcgacggctcgctatatgtcgccgaccgcacgccaacggcggaccgattgcagcgcatcaccaagaactcggaggtctctacggtatggacctggccggacaagcccggcgtggccgggtgtgccgcgatggacg

SEQ ID NO: 1380 - DNA, 401 bp, Mycobacterium tuberculosis H37Rv
cagcagccggtcattgcggtcgtcgttgtgcagttgaacacggcggttctccagcagcccgcgaaagccgttctgaaatccgaccaccgacgagccgtatcgggcgtggcaggtacgcaccaccgcacggatgacggcgttaaggccgggacagtcgccgcctccggtaagaactccaatccgcataccctcatcttgccgcgcggccgccgacctggcgcgagcagacacagaatcgcacgggcgaggggcgccggatgcgagtctgtgtctgctcgccgctaaatggcgctcagtagcgggccgcgggcggcctcataagccgcccccacccggtagagccggtcgtcggccaatgccggcgccatgatctgtaggccaaccggcaacccgtcgtccgg

SEQ ID NO: 1381 - DNA, 401 bp, Mycobacterium tuberculosis H37Rv
gttggtcttgcccaggatcgggatccccgcggcgcgcaaccgcgcggtcagcgtggcgtcgtagggagatcgccatccctccaggatttttgacccgcaggtggtgggcatgtcgctggtggtgaagacgtccttgagcgccagcggcaccccggccagcgccgacggcaagggttctccagcggccacctgcttgtcgatggcggccgccgccgccagcgcctcatcggccgccacatgcaggaaggcgtggtacgtctcgtcggtcgcctcgatctgatccaggcaggcccgggtgatctcggccgacgacacctccttgatggcgatcttggcggccagcgtcgcggcgtcggatcggatgatgtccgtcactgttcatcccccaggatctgcgggac

SEQ ID NO: 1382 - DNA, 401 bp, Mycobacterium tuberculosis H37Rv
gggcatgtcgctggtggtgaagacgtccttgagcgccagcggcaccccggccagcgccgacggcaagggttctccagcggccacctgcttgtcgatggcggccgccgccgccagcgcctcatcggccgccacatgcaggaaggcgtggtacgtctcgtcggtcgcctcgatctgatccaggcaggcccgggtgatctcggccgacgacacctccttgatggcgatcttggcggccagcgtcgcggcgtcggatcggatgatgtccgtcactgttcatcccccaggatctgcgggacggcgaagcggccgtcgacggcatcgggcgcctggtcgagcacctgacgctgggtcaggcacggcacggtctcgtccgggcgggtgacgttgacgtccttgagcgg

SEQ ID NO: 1383 - DNA, 401 bp, Mycobacterium tuberculosis H37Rv
cagcggcaccccggccagcgccgacggcaagggttctccagcggccacctgcttgtcgatggcggccgccgccgccagcgcctcatcggccgccacatgcaggaaggcgtggtacgtctcgtcggtcgcctcgatctgatccaggcaggcccgggtgatctcggccgacgacacctccttgatggcgatcttggcggccagcgtcgcggcgtcggatcggatgatgtccgtcactgttcatcccccaggatctgcgggacggcgaagcggccgtcgacggcatcgggcgcctggtcgagcacctgacgctgggtcaggcacggcacggtctcgtccgggcgggtgacgttgacgtccttgagcggattgtcggtggcctgcacaccggtgacgtcgacggc

SEQ ID NO: 1384 - DNA, 401 bp, Mycobacterium tuberculosis H37Rv
cgactccttgccagccgtcccaacaaaccccaacgccccagcaccccgatcagaagccagcaccgacaccgacgtgctcgcgggagccggctccaccgccgacaccaaccgcgcctgcggcgacaccacaccacccgacaccggcgccacactgcccaccaacgccgccggcgcgccagcagccgcacccaccgccggcagagcggccaatcccgccaccccggccaacccagctacacccggaaccacagcagcggccaacgcccccaacaacggcccccccaaaaggggaacaacaccaaacagattcccaataacccactcgacaactatgtctataacgcccgcaatggcatacaataatccgaccgcaacataagaagcattgatagcgaactctg

SEQ ID NO: 1385 - DNA, 401 bp, Mycobacterium tuberculosis H37Rv
gcgggcagggtggcgccgatcgcggccaccaggccggcgtgggcgtcgctggtgaccagcgcgaccccggacaggccgcgggcgaccaggtcgcggaagaacgccagccagccggccccgtcctcggcggaggtgacctggatgcccaggatctctcggtagccctcggcgttgacgccggtggcgatcaaggtgtgcaccccgacgacgcggcctgcctcgcgcaccttgagcaccagggcgtcggcggcgaggaaggtatacgggccggcatcgagcgggcgggtccgaaacgcctctacggcttcgtcgagctctttggccatgatcgacacttgcgacttggaaagctttgtcacaccaagtgtttcgaccaggcgctccatccggcgagtggatac

SEQ ID NO: 1386 - DNA, 401 bp, Mycobacterium tuberculosis H37Rv
gatggttgcggcacgggtgtcgaaatcacggtggcggtagccgttgcgctgattggaccgctcatcgctgcgttcgcggtagcccgccccgcacagggcgtcggcttcagcccccatcaaggcggcgatgaacgtcgagagcagcccgcgcagcagatccgggctcgcctgtgcgagttggtcagccagaagctgctcggcgtcgataagatgagaagaggtcattgcgtcatttccttcgattgacttttgctggtcgtttcgaaggatcacgcgatgaccgcccactactgggctacgacacgcccaccggccttacctgcccgtacaccacacccctggacgtaactccagtcgccgggtttctacgagtgatttggcgccgagtcaagccccggggt

SEQ ID NO: 1387 - DNA, 401 bp, Mycobacterium tuberculosis H37Rv
atcgcagtactcgtcgaaccggtcgccatcccggcgcgtatccgcggccgccggcagtgcgaagcctggcgtagtgctgaacacgtcatagcggagccgctgcgccgcctcgaccatgctgggatcggtggatagcaacagggaatagcgcggtccggttgacgatcctgtcgcgacgccatgcggtttgtcactgggtatcagcacagaagcgatgctcatagcaccaacgtggcgcagccgatcagctaatcggcatcaacgttgtgacgtgtcggtgcacgtcagatgacgaactgttgggctaggtgagcaggcgccaaggccccccacgcctcggcgtgtcggggtcttttgcgactgctcgcgcagggaacctagcccttgcgggccttgatggc

SEQ ID NO: 1388 - DNA, 401 bp, Mycobacterium tuberculosis H37Rv
agtactcgtcgaaccggtcgccatcccggcgcgtatccgcggccgccggcagtgcgaagcctggcgtagtgctgaacacgtcatagcggagccgctgcgccgcctcgaccatgctgggatcggtggatagcaacagggaatagcgcggtccggttgacgatcctgtcgcgacgccatgcggtttgtcactgggtatcagcacagaagcgatgctcatagcaccaacgtggcgcagccgatcagctaatcggcatcaacgttgtgacgtgtcggtgcacgtcagatgacgaactgttgggctaggtgagcaggcgccaaggccccccacgcctcggcgtgtcggggtcttttgcgactgctcgcgcagggaacctagcccttgcgggccttgatggcctcgg

SEQ ID NO: 1389 - DNA, 401 bp, Mycobacterium tuberculosis H37Rv
atcagcacagaagcgatgctcatagcaccaacgtggcgcagccgatcagctaatcggcatcaacgttgtgacgtgtcggtgcacgtcagatgacgaactgttgggctaggtgagcaggcgccaaggccccccacgcctcggcgtgtcggggtcttttgcgactgctcgcgcagggaacctagcccttgcgggccttgatggcctcggtcagctgcggagcgaccttgaacaggtctcccaccaccccgtagtcggcgatctcaaagatcggcgcctcttcgtccttgttgaccgcgacgatggtcttggacgtctgcatgccagcgcggtgctggatcgccccggagatgcccagggcaatgtagagctggggcgacaccgtcttgccggtctggccgacc

SEQ ID NO: 1390 - DNA, 401 bp, Mycobacterium tuberculosis H37Rv
ccgtcggtcgattcgttgcctgcgatcaccagctcggtgccctcgatggtgcccaacgcgcgcgccaaagcccacccggtttggatgacgtccgagccgtgcatgccgtcgtcctttaggtggacggccttgtcggcacccatcgacagcgccttgcggatcgcctcggtggcgcgctcggggcccgccgtcagcacggttaccgacccttcgatgccgtcggcggcctctttctcccgaatctgtagcgcttcctccacggcgcgctcgttgatctcgtccagcaccgcgtcggcggcctcgcggtccagcgtgaaatcgccgtcggtcagcttgcgctccgaccaggtatctgggacctgcttgatcaggaccacgatgttcgtcatgactgtggttcg

SEQ ID NO: 1391 - DNA, 401 bp, Mycobacterium tuberculosis H37Rv
ccttgtaccaggtggacggatgtgccccaccgaggtcctggaagaatttgagcactacgctgcgggtggcctgcggcggctggccggagctgtgctgttcgctggtggcgtccatttggtagggctggtctcgcagcggggacccctgcgcgacgttgacgaacccgtcgcggttttgcgtgatgtagtcggtcagcgcctgctggtcgggatagtcgacaggaaatgtcatatccagcatgtacttagggcccgaggcgtgcacatggcagatctggccggcctgcacagtgccgcccaggccggcgcatgacggcggcgcaccagccgccggccagcccaccaggaccacagcaacgagcactgcggtcgctatcagataacgcatcgtctaatcgtcc

SEQ ID NO: 1392 - DNA, 401 bp, Mycobacterium tuberculosis H37Rv
cgatggagcaggtcgcgtcgtgcactacccgaccggccagtcgcctggcccggtgccgggccacgggtgctgcggtagcctgctgcagcgcctcatcggtgaatagccattgcgacaccccaacgttcggacacagctcgcccagtttgccggcggcgcggcggcgcagcagcgtggtctccaccagccacggcgcccgatcgccaaaccgggcgcgcaccgcggcggtgtcggcaatgcgagtggcagcggtcagctcgagctctgcgaccgcggccagcgcaaccgcacccgattctgaccgcagatagctgacgtcggcggtggtgaacgtgagaccagtgaagccgctggtcaggacggcttaaccccggtaatcatcacgttgtagaaccagccct

SEQ ID NO: 1393 - DNA, 401 bp, Mycobacterium tuberculosis H37Rv
ggtgaccgggtagtcggaaatgccgcggatgaagtcgatgttgacgccgagtgcggccactcccctggccaccgcgctgaacgctccggcggtaatcgggcgtcccagcacgaaaatggtgtgggtggacggttgccgaatgattggcagatcgtcgctgcgctcgatggcgacgtctagacccaccccgtggatggcggccgcgacgtcgtcgcgcagcgcggtaccgtcggcaacgtccagcgggcacgacaccagcacacccagcgtgagccggccccggatcaccacttgttcgacgttgagcagctcgactccgtgctgcgcgagcacctcgaagagcgcggatgtcacgcctggctgatccatgccggtgaccgtgatcagcaccgacaccttgg

SEQ ID NO: 1394 - DNA, 401 bp, Mycobacterium tuberculosis H37Rv
gccgtcatcctggatagcgacccatggcgcaagctgtccgccaaccgtgacaaccgggtcttcgtcgtcaacgaccaggtatggcagaccggcgagggtatggtcgctgcccgcggcattgtcgatgatctgcgctgggtcgacgcgccgatcaactagtgaggcgcagcgctaggctttgggatacccacagctaaaaagttaatcaaagaaacgaagagggttgccatgagcactgttgccgcctacgccgccatgtcggcgaccgaacccctgaccaagaccacgatcacccgtcgcgacccgggcccgcacgacgtggcgatcgacatcaagttcgccggaatctgtcactcggacatccataccgtcaaagccgagtggggccaaccgaattaccc

SEQ ID NO: 1395 - DNA, 401 bp, Mycobacterium tuberculosis H37Rv
taggtataggagtcggtgacgtggaagccggtggcgtacacgatcacatcggcttcccggaagacctcacggccagtgccgtcggcggtgacgatcccgtcgtgcgtgatccggtcgatgcggtcggtgatcagttcggtcttcgggtccgccaccgcggggtaataggtagaggagttcaggatccgtttgcagccgatgcgataccgcggcgtcagcttgcgccgcagctcgcgatccttcaccgatcgacgaatattgtatttggcataggcctcgatgatcttcaacgtgttgggccgcttggtcatgccgtaggccagcgcctcctgggcccagtagatgccgaggcgcaacagtgcccgtagcccggggacggttcgcaacgcccggcgcagcga

SEQ ID NO: 1396 - DNA, 401 bp, Mycobacterium tuberculosis H37Rv
tctggtgagacctggtgaacctgggatctgccggtactcgaaaacactacacctagggggtggcacctagggggtggcacggagaagagatacaagatgttctgaataacattttcgaaattccctggtcgtaagcctggctcgagcaccgcggcggcgtgtcgcagatcacctcagccgccgccatacccgtctgacccaatatatcaccggccaccgacaacgtcgccgctagcttcccgccgaaccgctaccagcaaagccgatggagccgctattggctgacccgcctcggcccagggatcagccgacctcagcggccaagttgccgacggcgtcgcgcacattcgccgccagcccggcgtcgtccgcgaccgacttgcccagagtttggaacggca

SEQ ID NO: 1397 - DNA, 401 bp, Mycobacterium tuberculosis H37Rv
cgcgagctgctggaaaactacttcaccgcccgagtcaaagagcgccgcgaagcgtcgggcaacgacctgctgacggtgttgtgccagaccgaagacgacgacggcaaccggttctccgacgccgacatcgtcaaccacatgatcttcttgatgatggccgcccacgatacctcgacgtcaacggccacgacgatggcctaccagctggccgcccacccggaatggcagcagcgctgccgcgacgaatcggaccggcatggcgatgggccgctcgacatcgaatccctagagcagctggaatcgctcgacctggtgatgaacgagtcgatccggttggtgacgccggtccagtgggcgatgcggcagacggtgcgcgataccgaactgctgggctactacct

SEQ ID NO: 1398 - DNA, 401 bp, Mycobacterium tuberculosis H37Rv
actgctgggctactacctacccaagggcaccaacgtgatcgcatacccagggatgaatcatcgcctgccggaaatctggacagacccgctgacattcgacccggaacggtttaccgagccgcgcaacgagcacaagcggcaccgctatgcgttcacgccgttcggcggcggcgtgcacaagtgcatcgggatggtgttcgaccaattggagataaagacgatcctgcaccggctgctgcgccgctaccggctggagctgtcccgtcccgactaccagccccgctgggactacagtgccatgccgatcccgatggacgggatgccgatcgtgctgcgtcccaggtaggccctcttcggcggattccgccaatccaccggtgccgcagatgaaagtgccagtg

SEQ ID NO: 1399 - DNA, 401 bp, Mycobacterium tuberculosis H37Rv
cggctcacccgatcatcgaggccccagcggtgtcgaaattcgccggtagcggcaacggcccggtgttcgccggctcactgtttccattcctgttcatcaccatcgcgtgcggggcgctgtctggattccacgcgctcatctgctcgggcacgacgccgaagatgctggagaaggaaggccagatgcgcgtgatcggctacggcggcatgatgaccgagtccttcgtcgccgtcatagcactactcaccgcggcgatcctcgaccagcacctatacttcaccctcaacgcgccgtccctgcatacccacgacagcgcagccaccgccgccaagtacgtcaacgggctcggtttgacgggctcaccggtgaccccagaccacatcagccaggccgccgccagc

SEQ ID NO: 1400 - DNA, 401 bp, Mycobacterium tuberculosis H37Rv
cgatgcgctgggcaactttggcggtgtgctgcgcaaactgcagaatccgagctggcgtcccggtgcgtgggcttgccgtttggtggtcgtcgcggcgtggggcagcatcctgctgctcggtgtgaccgatccgctgggcggcatcaacacgctgttcccgctgttcggcattgccaaccagttgcttgccggaattgcgctgaccgtcatcaccgtcgtcgtcatcaagaaggggcgactgaagtgggcttggataccgggtattccactgctgtgggatctggcggtcaccctgaccgcatcgtggcagaagatcttctccgctgatccttctgtcggctactggactcagcatgctcactacgcggcagcccagcacgcaggcgagaccgcgttcggct

SEQ ID NO: 1401 - DNA, 401 bp, Mycobacterium tuberculosis H37Rv
tccggcgccgtcgacgttgttcgcgcccgctggcctgattcctacagccgcagagcgaaagttgcaacgacgtttgggcgcgccggcctcggcttccgtcgcggcgcccgactagccctcccgctgcagtggtaccggcgccgcaatcagacggcgagtaggcgtgggtccaacccgcgattcgcggcagccggcggagagggcgaccaagagacgttatcggttcgctcggggactcatggccggtctgctgggcacgatggctctcacgagcggcggtggtgtcgctcgcgaggatccattggaacctgatccgctagccccgatcatcgacgattccaggtaaacggattcgaaggcacctatagggacgtgccctgacgccccgccacaatggacgc

SEQ ID NO: 1402 - DNA, 401 bp, Mycobacterium tuberculosis H37Rv
ctggcacgggctggtaaccagtgagatggtccctgcggccgtgtcactcaccgggtcacgggatggcacgcaaaagaccggtgaaaccccactggcgcgctacgactactgagtgccagccgccagattggtcagatcccacgtcggggacgcttacccaacccgcgatgcgaacatccatttgtcggccagcgccgatacccagcccgctacgacctcaggattatccggtggcacctcgaccaacaccaactcgtcaacgcccagttcgcgagcacatcgacatcaccaacctgaggattagccagggccacggccagccgcagttcgccacgatcacgacccgactgttgccgtcgaacgatgcgacgtcgtcgcgccataatgtgcgcattgcagcg

SEQ ID NO: 1403 - DNA, 401 bp, Mycobacterium tuberculosis H37Rv
cggatctcgcccccgtcgcgggcgaactcagcgaaaaattccttcgcccagacgatttcgtcctgcgacggggatagcccctcattcaccaccggacattggtccggcgaaaggcagatcttgccggtcatgccaaactcggcggagacggccgtggcctcgatcagcttgagcgcgttggagccgatggtcggcccgtcgatcgcgctgggcagaccggcggcccgggccgcgatggtaaagcgcgaccgcgcgtaggccaatgttgccgggtcttcgccaaagccggtgtcccggcgaaagtcgccgataccgaaggcgagccggaaggtgcccttggccgcagcaatctcgttgatgcgctccagaccccgcgccgtttcgaccagtgcaacgatcgg

SEQ ID NO: 1404 - DNA, 401 bp, Mycobacterium tuberculosis H37Rv
gaggcgtactactccggatacggcctaacgcgtatggtcagccgcaactatgcccgcaacgcgcagcgctaccgggacctctactaccgcctgcacgccgaggtcgacgggccgatcgaccgtgtgggccgcgcggtcaccgagggcggatccgaggatgccatgctggtgcgcacctccgaccatggcgatctgctcggagcgcatggcggactgcaccagaagtggttcaacctctatgacgaggcaaccagggtgccgttcgtcattgcccgcatcggcgagaaggcaacccaaccgcgcacggtctcggcgcccacctcgcatgtcgacttggtgccgacgctgcttagcgcggccggcgtggacgtagacgtggtggccgcggccctggccgaatc

SEQ ID NO: 1405 - DNA, 401 bp, Mycobacterium tuberculosis H37Rv
cacgtctgcgcgcggcaatcgcagaccaccagcatcgttcagcagcgcggcggcctcgtcggtatcgaagcgcaaagcagccgaatcgatctcggctagttcgtcgccgatccgcaacctgcccaccggcaaaccggcgcgagaccagctggtcacgatgagctgcaggtggtgacatccgttgtccagcaggaaacccagggcagcttgggtgcggctgtcggacacccgatgccagtcgtcgatcaccaccgcgatccggtcgtcgttttcgtggatttcgtcgatcagcgaagtcaacacgtagcggccggcgtcatccccatgctcttcgagcacgtgccccaacgactcggccagcgtgggccggacccgccggatcgactcgagcaggtgcgaca

SEQ ID NO: 1406 - DNA, 401 bp, Mycobacterium tuberculosis H37Rv
cgcgaagctcctcgccaacgtctgccgcggtcgcgggacgatccgccggatggcgggccatcgcccgttcgatggcggcggccacgtccgcgggcagtccctgcttccgcaggtcggggatcggctgcgaggtgatccgcaggaactgggcgatcacccgctcaccgctgcggcgctcgtaggcggcatggccggtcagcgcacagaacaacgtcgcgcccagggagtacacgtcagaggcgggcgtcggcgatgctccttcgagaacttccggcgcggtgaaagccggggaaccggcaatcaccccggtcgccgtctcgaaacccccggcgattctggcgattccgaaatcggtcagctgcggttccccgtagtcggtcagcaggatattccccggcttc

SEQ ID NO: 1407 - DNA, 401 bp, Mycobacterium tuberculosis H37Rv
cctcctcaaccaatagcagaccactagcagtgaagccgcggccgccgcgcgcagcaccccagtgtcatggattatccatgattcgggcgtccccaatgcgaaccgcttctgtcagtcggggctggggtttcaccacccgtttcaccgaccgctgaccccaccataggctcgatactgccggggtgtcatcccaaaccagcgccggcacgaccggttgagcgcgctctgctcggaatagccgagcagcaccgcgatttggctcagatacaaccccggttgggcgaggtaccttgccgcttgcgcacggcgttcgcgctcgatgaggtcatggcaccggaggccctcggcagccaagcgccgctgcagcgttcgtgggtgcatgtcgagttggtcggcgatgg

SEQ ID NO: 1408 - DNA, 401 bp, Mycobacterium tuberculosis H37Rv
tccccgacaagacaatcgccctcctggaacgacgggagcgcctgggcggcacctgggacttgttccgctacccgggagttcgttcggactccgacatgttcaccttcggctacaagttccgcccgtggcgcgacgtgaaggtgctcgccgacggcgcgtcgatccggcagtacatcgccgacaccgccacggagttcggcgtcgacgagaagattcactacggcctgaaggtcaacaccgccgagtggtcgagccggcagtgccgttggaccgtcgcgggcgtgcacgaggcgaccggcgaaacccggacctacacctgcgattacctcatcagctgcaccggctactacaactacgacgcgggttatctgccggacttccccggcgtgcaccggttcggc

SEQ ID NO: 1409 - DNA, 401 bp, Mycobacterium tuberculosis H37Rv
ccgccccgggcgggatggcggaattctgcgcgctcgtcgagcagatctacgcccacccgctggatcgcgaccgcccgctgtggcagacctgggtggtcgagggcctcgacggcggccgcgtcgccctggtcacgctgctgcaccacgcctactccgacggcgtcggcgtgctggacatgctcgccgcgttctacaacgacacgcctgacgaggcccccgtggttgcgcccccgtgggagccgccgccgctgccgtccacccggcaacgcctcggttgggccctgcgggacctgccctccaggctcggcaagatcgcgccgaccgtgcgggccgttcgtgatcgggtgcgcatcgaacgggagttcgccaaagacggcgaccggcgcgtcccgcccacgttc

SEQ ID NO: 1410 - DNA, 401 bp, Mycobacterium tuberculosis H37Rv
ccttcaagaacgtggtcgtgtccaacgtgccggggccgcgtgagccgcggtatctcggccgctggcgcgtcgaccagtggttttccaccgggcagatctcccacggcgccacgctcaacatgaccgtctggagctattgcgaccagttcaacctgtgcgtaatggccgacgcagtcgcggttcggaacacctgggaattgctcggcggcttccgcgcctcgcacgaggagctgctcgcggcggcccgtgcccaagccacgcccaaggagatggccacatgacccgcatcaatccgatcgatctgtccttcctgctgctggagcgggccaaccggcccaaccacatggccgcctacacgatcttcgaaaagccgaaaggacagaaatcgtcgttcgggccgc

SEQ ID NO: 1411 - DNA, 401 bp, Mycobacterium tuberculosis H37Rv
ccgggaacgaggtagcgcgcaacgtacgcacgcagcccctcgtcgtcatcgagcgggatcgggccctccggcgcagcgaccggtaatccgttgccgttgagtgtgtttgagttgcccgttcatgcggcggcgctcgtcgatctcctcttgcaccagggcctcgaccgccagccgcgagccggtgatccggtcgtagcttcgggtccagcggccgccgcggcttgtcgccccatgcggtttggatcacccgccgcgtgctgcggctggtgtccagccaggcgattgcccgcgctcgcacccgctcggcgcgcgggttgtcggcgaccccgaagatgacctcggcgacgatgtcgagcgcgatcgggccggcgcggtctcggaaacggacctcctcgcccatt

SEQ ID NO: 1412 - DNA, 401 bp, Mycobacterium tuberculosis H37Rv
cgcgacctcggcggtcgaaagcaaaccaggtgcacaagtgcaacaacaacgattccgatcaccaacccagtcgccgcgcacgccgcggtgctgaccaaccaggtcagcgcgccaccagcagaccccaccaggtggtcatctaggtggtgaaccaggcggtacggggcgtgccagccgaggtggtcgctgcccacaagcactatgtggccgcccacccagagcatggctcccatcccgaccgctgacagcgccgatagcagtttgggcatccccgcgaccaggcccccgccgatccgctgcccgaatcgggacgcggtctgggtgaggcgcaggccgacgtcgtccatttggacgatgacggcgacgacaccgtacaccgcggcggtgatgacgagggcgac

SEQ ID NO: 1413 - DNA, 401 bp, Mycobacterium tuberculosis H37Rv
gccaagctggcgtcctcataacgattcccaacctcaaattgttgcgaatcgataatgcaagccgaaccacgtcgccgaacaaggccgtacaccttggccgggaaactatcgtcattttgtgcaccgtcgaacggccctgaagctcccgctgctgctggcggcaggcacggtgctgggccaagcgccgcgggccgccgccgaagaaccaggccggtggtcggccgaccgcgcacatcgctggtatcaagcgcacggctggctcgtcggtgcaaactacatcacctcgaacgccatcaaccagctcgagatgttccagccaggcacatacgatccccggcgcatcgacaacgagctgggccttgcgcggtttcacgggttcaacaccgtgcgagtcttcctcc

SEQ ID NO: 1414 - DNA, 401 bp, Mycobacterium tuberculosis H37Rv
gcgccgtgggggcccgctgaatttcctggtgaatcgtggcaaaaccgttcccgataccgctggcgaattcactctgcaacagcgaagcgttggccagctcggcggcggcataccccttggccgcgcctgtcaatgcctgcacaaaccgctcatgaaacaccgcaagctgtgcgctaagagcttgatagtcctgaccatggccggaaaacaaagccgcgatcgcggctgacacctcgtcctcggcagcggctaataccgtcgtggtggcacccgcgacaccctggctcgccgtcgcgaccaccgaaccaatcgaagccacgtctgtggccgcggcggacatcacctccggcaacgcaacaacataagacaccacgccgctcccgccacctcacggcaacttc

SEQ ID NO: 1415 - DNA, 401 bp, Mycobacterium tuberculosis H37Rv
acttccccagttgcccagccactaccgatcgccgagtagccggagcttatgcccacgccgagtagtcacgtgccagtttgcgcgaattcccaaagttagaccggcaaacgtgacggcaccgatccgtgtggtgcagccgccgggaatcgaacactctccgacgcaaaacgacctgcgattacgcgcggggcgttgatggcgtcaagaaggaatgaggcggcgaacgcgggcgttggggtgccgctatgcgttgaacaattgctatacgattgtgcaacatcagctatcgtcgtactcatgaccgcgaccatcggcttccgacctactgaaaaagacgagcagatcatcaacgccgcaatgcgcagcggcgagcgcaagagcgacgtcatccggcgggcact

SEQ ID NO: 1416 - DNA, 401 bp, Mycobacterium tuberculosis H37Rv
acactctccgacgcaaaacgacctgcgattacgcgcggggcgttgatggcgtcaagaaggaatgaggcggcgaacgcgggcgttggggtgccgctatgcgttgaacaattgctatacgattgtgcaacatcagctatcgtcgtactcatgaccgcgaccatcggcttccgacctactgaaaaagacgagcagatcatcaacgccgcaatgcgcagcggcgagcgcaagagcgacgtcatccggcgggcactgcagctgctcgaacgggaagtgtggatcaagcaagctcgcaccgacgctgagcgacttcgagacgaggatgtctccactgaaccggacgcgtggtgattcggggagcggtctacagggtcgacttcggcgatgcgaagcgaggccacgag

SEQ ID NO: 1417 - DNA, 401 bp, Mycobacterium tuberculosis H37Rv
ccgctacggcgatgccgacacccatcgtcgcggccagcatcgcctccactaggaacggcagctgggtgtaccagcggctggcaccgaccaagcgcatgatgccgatttcggtgcgccgcgtataggcagccacttggaccatgttggcgatcaacagaatcgccccgatggcctgaaccagcgcgaccgcgaacgcggcattgctcaaaccatcaaggaccgcgaacagccggtcaatcagctccttttgattcagcacgtccaagacgccgggctgccccttcatagcggtgtcaaagtccttgtgctgctcggggttctccagcttgacaatgaacgacgccgggaacgaatccttgcccgccacgtccttgaactggggaaacttgcggatggcatcg

SEQ ID NO: 1418 - DNA, 401 bp, Mycobacterium tuberculosis H37Rv
cccgcttccgcttcttcggcaatgtggtcgtcggcgaacacgtccagcccggcgagctctccgagcgctacgacgccgtgatctacgccgtcggcgcgcagtccgatcgcatgttgaacatccccggtgaggacctgccgggcagtatcgccgccgtcgatttcgtcggctggtacaacgcacatccacacttcgagcaggtatcacccgatctgtcgggcgcccgggccgtagttatcggcaatggaaacgtcgcgctagacgtggcacggattctgctcaccgatcccgacgtgttggcacgcaccgatatcgccgatcacgctttggaatcgctacgcccacgcggtatccaggaggtggtgatcgtcgggcgccgaggtccgctgcaggccgcgttc

SEQ ID NO: 1419 - DNA, 401 bp, Mycobacterium tuberculosis H37Rv
tcgtgcggtcggtcggctaccgcggggtgcccacgcccgggctgccgttcgacgaccagagcgggaccatccccaacgtcggcggccgaatcaacggcagccccaacgaatacgtcgtcgggtggatcaagcgcgggccgaccggggtgatcgggaccaacaagaaggacgcccaagacaccgtcgacaccttgatcaagaatcttggcaacgccaaggagggcgccgagtgcaagagctttccggaagatcatgccgaccaggtggccgactggctagcagcacgccagccgaagctggtcacgtcggcccactggcaggtgatcgacgctttcgagcgggccgccggcgagccgcacgggcgtccccgggtcaagttggccagcctggccgagctgttg

SEQ ID NO: 1420 - DNA, 401 bp, Mycobacterium tuberculosis H37Rv
gcaccaatgcctgtgaccgaaggcggttcgggctgtcattgacaattcatgaagatgcctgccgcatcatatccgttgtgcccgttgttctagaagtccgacgtgctgagcctgcccacccggcgaccccatatccggaacccctcgcgcgctgcagccgctcacctggtctgaacgaaagctcgcacatgagtggtcggattccgccctaacaacgcgccataaacgcaggctcatgcgctgcgccacgatgcgccgatgcatttcggtaacgattgttagttaacccttgtacgaaactctcttgaggcgctctaaccgactgcgtccaaagtggaggatcgaaaagatgataggaaaatgagtacgcctacgctgcctgatatggtagctccatcccc

SEQ ID NO: 1421 - DNA, 401 bp, Mycobacterium tuberculosis H37Rv
cccacccggcgaccccatatccggaacccctcgcgcgctgcagccgctcacctggtctgaacgaaagctcgcacatgagtggtcggattccgccctaacaacgcgccataaacgcaggctcatgcgctgcgccacgatgcgccgatgcatttcggtaacgattgttagttaacccttgtacgaaactctcttgaggcgctctaaccgactgcgtccaaagtggaggatcgaaaagatgataggaaaatgagtacgcctacgctgcctgatatggtagctccatccccgagagtgcgagtaaaagaccgttgtcgccggatgatgggggacctacgcctttccgttatcgatcagtgcaatttgcgatgccgttattgtatgcccgaagagcactacacatg

SEQ ID NO: 1422 - DNA, 401 bp, Mycobacterium tuberculosis H37Rv
cggacggaactaccttcggaattatcgcgtcgacaacggagccattctgcgcaacctgtgaccgttcacggttgaccgccgatggcttatggctgcattgcttgtacgcaatatcgggtatcaacctaagggagccgctgcgtgcaggcgcgactcacgatgacttggtggaaaccgtgacaaccggatggcggcgacgaacggatcgcggagcagagcagcgtcttgcccaacgcgagcgcggagtgttcctgccattaagcacgttaaaggccgacccgcatctggagatgcacaccaggggcgggtaagccgaacgaacagtcgattgatcaacgactccacagttgaggaaggaaccatgacggtcagcacccctgagcaacacgagcaacgagcat

SEQ ID NO: 1423 - DNA, 401 bp, Mycobacterium tuberculosis H37Rv
ctcagatcgtgctccaagagaaaagcggcggccggtccggagtttatcgccgaagtgcttctgatttggcctgtcagtcccgataagtaggtgagtgtctgaatgattaaagtgaatgttctttacttcggtgccgttcgtgaggcgtgtgacgaaacgcctcgggaggaagtagaggttcagaacggtaccgatgtcgggaatcttgttgatcaactccagcaaaaataccctcgccttcgcgatcattgtcagcgagtacagatggcggtcaaccaattcatcgcgccgctgtcgaccgttctcggcgatggtgatgaggtcgccttcatcccgcaggtagccggaggctgaacaaggggatgaccggccgtgaatgcgctctcatcgtcgccgctgtt

SEQ ID NO: 1424 - DNA, 400 bp, Mycobacterium tuberculosis H37Rv
gatggtgatgaggtcgccttcatcccgcaggtagccggaggctgaacaaggggatgaccggccgtgaatgcgctctcatcgtcgccgctgttcggcaacgtgggagttccagtgccggcgtgcagaacgaccgaaattcgccgcacccgaatagtcgggtcgcatagatgaccagcagggatggattcaccatcgtttgggattggaacgggacgctgtgcgacgaccggacaattcttctcgacgcggttgggcagacgctggtcaacgagggattcgagcctctttcgcaacagcagctgatccaacggttcgcacgcccactacgaacgtttttcgagaatgcgtgcggtcgagatctcttgacgtccgagtgggaacgcgtccaatccacctttcg

SEQ ID NO: 1425 - DNA, 401 bp, Mycobacterium tuberculosis H37Rv
aaaatacgggattgccaagtggttcaacggaatccgtggccggactcggcccgaccaagaaaaacccatgatgctggcagaactgatcatgcagcgctctctgaatcccactcgcgtggtgcacatcggcgattcgcttgaggacgccgctgctgccagcgcggtcggagccatttccgtcttggtcaccggagcttcactgcagccacccgaccgagtcatgctcaaacagttgcagcccttcgttgcgagttcgctgaagcaagcactgcagtacgcgggtggcgacggtgattgacgacgaaggtacgcaggtggtggcggcgcgcctgccgttcggatggtcagccgacagtggggtgacagccgacatcatcgaggcagcgatggaacttgcgatc

SEQ ID NO: 1426 - DNA, 401 bp, Mycobacterium tuberculosis H37Rv
cgccgctgctgccagcgcggtcggagccatttccgtcttggtcaccggagcttcactgcagccacccgaccgagtcatgctcaaacagttgcagcccttcgttgcgagttcgctgaagcaagcactgcagtacgcgggtggcgacggtgattgacgacgaaggtacgcaggtggtggcggcgcgcctgccgttcggatggtcagccgacagtggggtgacagccgacatcatcgaggcagcgatggaacttgcgatcgacacagcgcgacatgccacggcaccgtttggcgctgcgctgcttgatgttacgacactccgagcattctcgggtggcaacacctattttgaatcgggggatcgcttcgctcacgccgaaaccaacgttctacgggccgcaatg

SEQ ID NO: 1427 - DNA, 401 bp, Mycobacterium tuberculosis H37Rv
gatccatcgcattgactcggcttgccgactacctcactgacccaggaggagagttacgtccaggggtgtggtgtacgggcaggtaaggccggtgggcgtgtcgtagcccagtagtgggcggtcatcgcgtgatccttcgaaacgaccagcaaaagtcaatcgaaggaaatgacgcaatgacctcttctcatcttatcgacgccgagcagcttctggctgaccaactcgcacaggcgagcccggatctgctgcgcgggctgctctcgacgttcatcgccgccttgatgggggctgaagccgacgccctgtgcggggcgggctaccgcgaacgcagcgatgagcggtccaatcagcgcaacggctaccgccaccgtgatttcgacacccgtgccgcaaccatc

SEQ ID NO: 1428 - DNA, 401 bp, Mycobacterium tuberculosis H37Rv; identical to SEQ ID NO: 1427

SEQ ID NO: 1429 - DNA, 401 bp, Mycobacterium tuberculosis H37Rv
gtcgaggaggtggacaaggtgcgcgccgagttggccaactatcaccgtttcgcgcaggtcagtgagcagatcgtggcggtcaacgaggcgatctgcgaggcccgcccaccgaacccggcggccacggcgcccccggccggcacaacggggcacaaaaaagggggctctgcgaccagatcgcggcggagttcaccgccgaggtagagcggctggttgcgctcgcggtcggtgcgctgggatcctcggtgccgacctggtcgcagtggagttggcgatccgcactgcgatgacccggctgggctcctcgctgctggagcagctgctgggcgccgacaccgggcaccggggccagcgcatcgattgcgggcaagggcattgcgcgtggttcgtcggttaccgcg

SEQ ID NO: 1430 - DNA, 401 bp, Mycobacterium tuberculosis H37Rv
cccggccggcacaacggggcacaaaaaagggggctctgcgaccagatcgcggcggagttcaccgccgaggtagagcggctggttgcgctcgcggtcggtgcgctgggatcctcggtgccgacctggtcgcagtggagttggcgatccgcactgcgatgacccggctgggctcctcgctgctggagcagctgctgggcgccgacaccgggcaccggggccagcgcatcgattgcgggcaagggcattgcgcgtggttcgtcggttaccgcgacaagaacctcgataccgtgctggaccgggtccggttgctccgcgcctgctaccactgccgcacctgcgggcgtgggatggcgccccctggatctggaacctggccaccgcgatcctgcccgaagccaccc

SEQ ID NO: 1431 - DNA, 401 bp, Mycobacterium tuberculosis H37Rv
cgagatgagatcgaggcaccaggtgcattgtgcaccacattctggcgatgttggtgaggtttgttcctgcgcccgtccgtggcgcgttcgggatcgttggggttggccggttgcccacctcggcggaagcggacggtgagcgcggccgagtcgtcgacatttggcggtaggaggtttcgatgctgtttgtcagcgtggccccggagtcggtaggggtggcggcggcgactcttgttgggcccccgttgatcggcaacggcgccgatcggcccccggcaccggacaagccggcgggatcttgtggggcaacggccgttttcgcccaatcacaggagtggagttttgaacgcaacgacggcaggtgctgtgcaattcaacgtcttaggaccactggaactaaa

SEQ ID NO: 1432 - DNA, 401 bp, Mycobacterium tuberculosis H37Rv
ccgccaacgcggcctcaaacgccgtcgctgccgcgcgagcctgaatggccgccagctgcgcctgcgacgccaccgtgctcaaccacccgacatacggagacgcggcagcagccatcgacatcgacgccggaccggtccacggcccagtcgtcaacgcggcgagcaccgactcaaacgacgatgccgatgcccacaaatccgcggctagcccctcccacgccgaggccgccgcaaacaacggccccgagccggctccggcaaacatgcgcgccgagttgatctccggcggcagccacgaaaagcccaaaaccatcgcaaccccagcccaatcagccgcccagaagggtctcgtacaagggttaactaaacaatcgttaccgaatgaatcgacacatcgtgac

SEQ ID NO: 1433 - DNA, 401 bp, Mycobacterium tuberculosis H37Rv
ctccgagcacactactgtgcacctgttcgtcaaccgccaccgaacggtgccggccaccgaccattccggccggcaagcgatcatcagttgcggtgccgtactcgatcaccttcgcatcgccatgacggccgcgcactggcaggcgaatatcactcgctttccccagccgaaccaacctgaccagttggccaccgtcgaattcagtcccatcgatcacgtcacggcgggacagcgaaaccgcgcccaggcgattctgcagcgccgaaccgatcggcttccgtttgacagcccgatgtactggcacctgtttgagcccgcgctgcgcgacgccgtcgacaaagacgttgcgatgcttgatgtggtatccgacgaccagcgaacacgactggtggtagcgtcac

SEQ ID NO: 1434 - DNA, 401 bp, Mycobacterium tuberculosis H37Rv
ggtcgttgaccagcttccacatccggttgagcacggcgcgttcctcggcggtgtcatagcggtagtagaacgcgtacttgcggaccaggtggttgttcttggactcgatggtggcctagtggtttttcttgtacgggcgaaagcgggtgaagtagataccgttgtcgccggcccagctgatgaccggcttgttgagaaacacggtgccgttgtcgaaatctaaacccgttatcccatgcgggatctcggtgacagaagctttgagcccggcgaggatgtgggtacgggcgttgttgcggacggtgcgggtgaacacccatccgatgtgcacgtcggtcaagttcagggtgtgggcgaactcgcctttgagcgtcggaccgcaatgggcgacggtgtcgccc

SEQ ID NO: 1435 - DNA, 401 bp, Mycobacterium tuberculosis H37Rv
aagcccctggaccgccttgactcagcacaacaacgacacccgctacggtacctctggcccgcagcggcaacagcagcgccggacctgcgtcggccagttcgtccaggccttccaaatcgacccggtcgacccgtcgcggaatgccgttgacgaagacctcccgcagcaccgcgcccgccaccggaatcgttcgcccaacaatggaagccacagcgctgccgactgtttcaatcaccagcagctcccccacgtcagcggcaggcatgtcctcgtcgacgggaacggctaccagggcagcgtcagccgccgtcagcttgagcgcctccgcggcgacaagccggaacaccgtcgcgggttcggtgccggacaacaactcggtggcgatgtcacgggtggcctcg

SEQ ID NO: 1436 - DNA, 401 bp, Mycobacterium tuberculosis H37Rv
ctgaccggtatgcactggtggggcccggcgtccacgtcgatgctggccatgtcggctccatacgtggaatggctggagcggaccgccgcgcagaccaagcagaccgctacccaagccagagcggcggcggcggcattcgagcaggctcatgcgatgacggtgcccccagcgttggtcacaggcatccggggtgccatcgtcgtcgaaacggccagtgccagcaacaccgctggcactccaccttgacccattcagttctcgaccagcacgacaccgtatccgcacaaatgtaaggagctgagacacaatggatttcgcactgttaccaccggaagtcaactccgcccggatgtacaccggccctggggcaggatcgctgttggctgccgcgggcggctggg

SEQ ID NO: 1437 - DNA, 401 bp, Mycobacterium tuberculosis H37Rv
ccgatttgacgatcaagtgaagctcaccagctacggacgctctagcggattctgtgtcgatccgatcgagaaaaagccgctcaaccacttcttgccaggttcggcgacgctgtctttcggcaccgccgggtgcaacctggcgtgcaagttctgccagaactgggatatctccaagtcccgcgagatcgacgtcctggccagtcgggcggccccggccgacatcgcccggaccgcacacgaattgggttgccgcagcgtggcattcacctacaacgacccaacgatcttctgggagtatgccgccgatgtagccgacgcctgccacgaccagggaatcaaagccgtcgcggtgacggccgggtacatgtgtcctgagccccgcgcggaattctaccggcgtg

SEQ ID NO: 1438 - DNA, 401 bp, Mycobacterium tuberculosis H37Rv
cttttatcgcaaggtttgcgtcagtcacctgcgcaacgtcctggacaccctggcctacctgcggcaccagacgaatgtgtggttggagatcaccaccctgctgattcccggacgtaacgacagcgacgcggaagtcgctgccgaatgcagatggatccgcgaaaacctgggcgtcgacgtgccggtgcatttcaccgcgttccatcccgactacaagatgatggacaccccggctacaccaaccgccacattgacccgagcccgcgagatcggcattggcgaaggcctgcgcttcgtctacaccggaaacgttcacgatgccgtgggtggcagcacctcgtgcccaggctgccgggcaacggtgatcgttcgcgactggtattcgatacgacattacgccc

SEQ ID NO: 1439 - DNA, 401 bp, Mycobacterium tuberculosis H37Rv
cctggacaccctggcctacctgcggcaccagacgaatgtgtggttggagatcaccaccctgctgattcccggacgtaacgacagcgacgcggaagtcgctgccgaatgcagatggatccgcgaaaacctgggcgtcgacgtgccggtgcatttcaccgcgttccatcccgactacaagatgatggacaccccggctacaccaaccgccacattgacccgagcccgcgagatcggcattggcgaaggcctgcgcttcgtctacaccggaaacgttcacgatgccgtgggtggcagcacctcgtgcccaggctgccgggcaacggtgatcgttcgcgactggtattcgatacgacattacgccctcaccgaggacggccgctgccaagcatgcggctatcaga

SEQ ID NO: 1440 - DNA, 401 bp, Mycobacterium tuberculosis H37Rv
tggacaccctggcctacctgcggcaccagacgaatgtgtggttggagatcaccaccctgctgattcccggacgtaacgacagcgacgcggaagtcgctgccgaatgcagatggatccgcgaaaacctgggcgtcgacgtgccggtgcatttcaccgcgttccatcccgactacaagatgatggacaccccggctacaccaaccgccacattgacccgagcccgcgagatcggcattggcgaaggcctgcgcttcgtctacaccggaaacgttcacgatgccgtgggtggcagcacctcgtgcccaggctgccgggcaacggtgatcgttcgcgactggtattcgatacgacattacgccctcaccgaggacggccgctgccaagcatgcggctatcagatg

SEQ ID NO: 1441 - DNA, 401 bp, Mycobacterium tuberculosis H37Rv
tgacccaccccgatgcgctggcccagcagtggtcacaactcgagcggctgctacgctcgggcaagctgcctcctcccgaaccagtggtctacccactggaccaagccgctgcggcgattgcatcgctggagaatcgcaccgccaaggggaaggtcgtactacgcgtgcgcgactaacgcccctcccgggacgcgtcgccggcgtgctctggccaatttgccgcttcctcactggtcgccgttggcgtcggctacgtcatgccgcacaactcgcagcttgcctggcgccaggcacgcggcgtatccgtggtatttgccatacagttcccatgcggtgacgcgatcatcggggtgcacgtcgatctgatgaccgtcggagaactcaagatggagatctccggt

SEQ ID NO: 1442 - DNA, 401 bp, Mycobacterium tuberculosis H37Rv
cgggcaagctgcctcctcccgaaccagtggtctacccactggaccaagccgctgcggcgattgcatcgctggagaatcgcaccgccaaggggaaggtcgtactacgcgtgcgcgactaacgcccctcccgggacgcgtcgccggcgtgctctggccaatttgccgcttcctcactggtcgccgttggcgtcggctacgtcatgccgcacaactcgcagcttgcctggcgccaggcacgcggcgtatccgtggtatttgccatacagttcccatgcggtgacgcgatcatcggggtgcacgtcgatctgatgaccgtcggagaactcaagatggagatctccggtgtcataccagacgaaagctgtgcaggttgccccggcgaaatcgaagagcggacgctc

SEQ ID NO: 1443 - DNA, 401 bp, Mycobacterium tuberculosis H37Rv
cctggtgctcaccggccgtccggacgacacctggctggccagctggtcgcgggccgaggccgcagtgccgcatcccgtcgaccccatcgtgctgggccgcacggtgctctcactgttgcgcgcacccgcccactaaccggacgcggccggcattcgcggcgcgaacgttcagccgccccgcatttgaatcttcgggtcctttcttacccgaggtcgtaattggcccgctgccgcttccggccgcaacgacggcgctgtctcctccgccgctgaagtctctgaagcctgctgaccttgcgcggtgcgtagtgtcgattccggaattccagaacccgcggattggcctacccgcgttgtcgacagcggagcggccttggccgcaactttcggatccacagttg

SEQ ID NO: 1444 - DNA, 401 bp, Mycobacterium tuberculosis H37Rv
atgccgagattaacaacaaatgctgcgcttatcagggggttagaccaacattcatacaattcgccgggacgcgcaatccccagttttgcttcgcagcgaccgacgccggacccagccacgggttctgcttcgactcgcacaggtatgcaccagcctgaccccgggaatgtggggtggccgttgcgcgactatgttgaaggtcactgtgacggcccgaagccccggttcgtcacggcagcccggtcaccgcccggccgccgcgctggcggccccgtacgacggatcatggagcgagttgaacgtctacatacccatcctggtactggcggcgctggccgccgccttcgccgtggtgtcggtggtgatcgcgagcctggtcggcccgtcgcggttcaaccggt

SEQ ID NO: 1445 - DNA, 401 bp, Mycobacterium tuberculosis H37Rv
catcaagtactacctgaccgcgatgttgttcatcgtcttcgacatcgaaattgtgttcctctacccgtgggcggtcagctacgactcgctgggcacgttcgcgctggtcgagatggcgatattcatgctcacggtgttcgtggcctacgcgtatgtgtggcgccgcgggggcctgacgtgggattgaggtagggcgtgggactggaagaacagctgcccggcgggatcctgctgtcgaccgtcgagaaggtggcgggctatgtccgcaaaaactccctgtggccggcaacattcggattggcgtgctgtgcgatcgagatgatggcgaccgcgggaccaaggtttgacattgcgcggttcgggatggaacggttctcggccacgccgcggcaggcagatct

SEQ ID NO: 1446 - DNA, 401 bp, Mycobacterium tuberculosis H37Rv
gaaacagtcgtcgaagcccggtgcggaatcggctacctgcacaccggaatcgagaagaacctcgaataccggtactggacccagggcgtcaccttcgtgacccgaatggattacctgtcaccgtttttcaacgaaaccgcctactgcctcggcgtggagaagctgctcggcatcaccgatgagatacccgagcgggtcaacgtcatccgcgtgctgatgatggagctcaaccggatctcgtcgcatttggtcgcattggcgaccgggggcatggaattgggcgccatgactccgatgttcgtcggcttccgggcacgcgagatcgtgctcacgctgttcgaaaagatcaccggtttgcggatgaacagcgcctacatccgacccggcggcgtggcgcagga

SEQ ID NO: 1447 - DNA, 401 bp, Mycobacterium tuberculosis H37Rv
gcgctgttgccgttgctgcacctggtgcagggcgaggattcctacctgacgccggcgggtttgcggttctgcgccgatcaactcgggctgaccggggccgaggtgtcggcggtggccagcttctacaccatgtaccgccggcgccccaccggcgagtacctggtgggtgtgtgcacgaacacgctgtgcgccgtcatgggcggcgacgccatcttcgaccgcctcaaagagcatctcggcgtcggccacgacgaaaccacctccgacggtgtggtcaccttgcaacacatcgaatgcaacgccgcctgcgattacgcaccggtggtgatggtcaactgggaattcttcgacaaccagacgccggagtccgcgcgcgaactcgtcgactcgctgcgctccga

SEQ ID NO: 1448 - DNA, 401 bp, Mycobacterium tuberculosis H37Rv
ggcaacacggtgcagatctgcccggtgggggcgctaacggggaccgcctaccggttccgcgcgcgtccgttcgatttggtctccagccccagcgtctgcgagcactgcgcgtcgggctgcgcgcaacgcaccgaccatcgccgcggcaaggtgctgcggcggctggccggtgacgacccggaagtcaacgaggagtggaactgcgacaagggccggtgggccttcacgtacgcgacccagccggacgtgatcaccactcccctgatccgcgacggtggggaccccaagggcgcgctggtgcccacctcgtggtcgcacgcaatggcggtggccgcccagggactggcggcagcgcggggccgcaccggggtgctggtcggcggccgagtgacctgggagga

SEQ ID NO: 1449 - DNA, 401 bp, Mycobacterium tuberculosis H37Rv
aacgctacggccgggtgtaccagattaactatttgcgttgcatcggttgcggtttgtgcatcgaggcgtgcccgacgcgggcgctgacgatgacctatgattacgaactggccgacgacaaccgcgccgacctgatctacgagaaggaccggctgctggccccgctgctgcccgagatggccgcgccgccgcatccgcggacgcccggtgccaccgataaggactactacctaggcaatgtgaccgccgagggcttgcggggcgtgcgtgagagccagaccaccggagattcccgatgaccgcggtgctggcttcagatgtcatcgtccgcacctccaccggggaagcggtgatgttctgggtgctcagtgcgttggcgctgctgggcgcggtcggggttg

SEQ ID NO: 1450 - DNA, 401 bp, Mycobacterium tuberculosis H37Rv
gtgcgccaagtccgcgcaggttccgctgcaagcctggcttggcgacgcgatggagggccccaccccggtgtccgcgctgatccacgccgccaccatggtgaccgccggagtgtatttgattgtgcggtcgggcccgctgtacaacctggcgcccaccgcccaactggcggtcgtcatcgtcggcgcggtgacgctgctgtttggggcgatcatcggctgcgccaaggacgacatcaaacgtgcgctggcagcctcgaccattagccagatcggctacatggtgctggccgcgggcctgggtccggccggctacgcgtttgcgatcatgcatctgctcactcacggtttcttcaaggccggcctattccttgggtccggcgcggtgattcacgcgatgcacg

SEQ ID NO: 1451 - DNA, 401 bp, Mycobacterium tuberculosis H37Rv
cggcgcgatcgtggcgatcggccaaaccgacatgatgcggctgatcgcctacacctcgatctcgcacttcgggttcatcatcgcaggcatcttcgtcatgaccacccagggccagagcgggtcgacgctgtacatgctcaaccacggcctgtccacggcggcggtgttcctgatcgccggtttcttgatagcgcggcgcggcagccgatcgatcgccgactacggcggtgtccagaaggtggcgcccatcctggccggcacgttcatggtctcggccatggccaccgtatcgctgcccggcctagccccgtttatcagcgaattcctggttctgctgggcactttcagccgctactggctggcggcggcgttcggcgttaccgcactggtcctctcggccg

SEQ ID NO: 1452 - DNA, 401 bp, Mycobacterium tuberculosis H37Rv
cgcccatcctggccggcacgttcatggtctcggccatggccaccgtatcgctgcccggcctagccccgtttatcagcgaattcctggttctgctgggcactttcagccgctactggctggcggcggcgttcggcgttaccgcactggtcctctcggccgtttacatgctgtggctctaccagcgggtgatgaccggtccggtagccgaaggcaacgaacgcataggggatctggtgggccgcgagatgatcgtggtggcaccgttgatcgcgctgttactcgtgcttggggtctaccccaaacctgtgctcgacatcatcaatccggcggtcgagaacaccatgaccaccatcggccagcatgatcccgcgcccagcgtggcacacccggttccggccgtg

SEQ ID NO: 1453 - DNA, 401 bp, Mycobacterium tuberculosis H37Rv
gtcaccgcggtaaaccagaccaacgtcaagcgtatgctggcctattcatcggtcgcgcacgtcggtttcatacttaccggcgtgatcgccgataatccggcgggtctttccgcgacgttgttctatctggtcgcctacagcttcagcacgatgggtgcgtttgccatcgtgggtctggtccgaggcgccgacggctcagcaggttcagaggatgccgacctgtcccactgggccgggctgggacagcgttcacctatcgtgggcgtgatgctgtcgatgtttctgctggccttcgccggcatcccgttgaccagtggattcgtcagcaagttcgcggtgtttagggccgccgcttccgccggcgcggtgccgctggtaatcgtcggcgtgatctccagcgg

SEQ ID NO: 1454 - DNA, 401 bp, Mycobacterium tuberculosis H37Rv
tttccgttgccgaggtttccaaagcctcggtttccgctgcccagattgacattgccaacgtttccgctgccgagattggtgttgccgatatttccgctgcccaaattcgtggcaccgtcatttccgctgcccacattggcgttgccggagtttccgctacctacgttggcgttgccggaatttccgctgcccagattgtagtcaccggtgttcccgccgcccaggttcccgacgccgatgttgccgaggccgatcgcggcggccagcgccgatggcgcagctggcaacgcctgctgcagaccaattgaccacgacgacagctgcgccgcggccgccgatgccccgccgtgatagcccaccatcgcggccacatcggcggcccacatctgttcatacatcgc

SEQ ID NO: 1455 - DNA, 401 bp, Mycobacterium tuberculosis H37Rv
caaccggccatccagcccatagcgccacaggtggtattggcaggtcaacgtgtcgatgcgccccgcaccgggttccaccatcagcatcaaccggtgccggcagatcggcgaaagagcgtgcagctgcccgtcgacgtcccgcaccaccatgaccggctcccctgcgacggacacggtgacgtagtcaccggtcttggcgacttggtcgacatgcgcgacaagcatccaggaccggttgaagatccgttcccgctccagctgccacagctccgatgaggtgtaggcggccggcggcaggcttagcgccggtggattgtcgtcgaggtaatccccgatgtcggtaaggatgtctccgagctcggctcggttatcagttgataacataccctccatgttatcga

SEQ ID NO: 1456 - DNA, 401 bp, Mycobacterium tuberculosis H37Rv
ttgggcaacgcacccatcgactgctgaagcgagtgatccgccggccaggacagcacgtcgaccccgatggtggccatgtcgcgatacatcgcggagcgctgcagcgcccacatccggaccaccaggggatccagttggtcctggagcggacagctatcaagaacgtcgacagcaaccacgacgtggccgcgtttacgcaggtcgatcaacgccagcgcgaactcggtatccagcagcgtggaaaacgcaatgacaaccgctcctgcgggaacagctgcgcgcggagccagcgtcccggtggtgttttcgaacccttccccggcgccgagcacggtgtcgagcacccgatagaactggcgctgcccgatgtcggcgcccagccatcgcggccgattgccgcc

SEQ ID NO: 1457 - DNA, 401 bp, Mycobacterium tuberculosis H37Rv
tggtcgagccgagcagatcggccggcagcaaatcaggcgtgaattgcactcgggtgaaatcgagccccaacgcggcggcgaaggatcgcgcgatcagcgtcttgccgaggccggggagatcttcgatgagcacgtggccacgggcgagcacggcggtgaggatgagtgtcagtgcagagcgcttccccaccaccacacgttcgatttcgtcgagcaccgcctcgcagtgggcggtggtcgtcgcggccggcataatcatcgttgagtcatacctgttctaacttctgcagaatttcttccagtgccgcacggccggggcctggttgacggtcgccggtgtgcgtcacattgttcgggttgacccattcccacaattcgtcgccgaaaagcattcggccggt

SEQ ID NO: 1458 - DNA, 401 bp, Mycobacterium tuberculosis H37Rv
gccgacttgcgctgtcgtcgcgaggtaatcagcgaccccgcgacgaccatcaagaacaggccgattgtgctggcaaagagaatgccgagcacgtcgtcattgttgtcttgcggcggttgcgggcgcgacggcgtggtgctggaagcatccggcgtagcggttgaatccggtatgggcgcagcaggaccgacatcatcgggcacgaacaaccgtgccagcagtatcgcaatcagcagccaggccaggattgtcccgagtccgagcaacagcacacgccagttcggacgccctgctgcaccgccaagcattgccgagagctcccccgcgctgggcgccaccgggagcggatgtcgcaaccgggtgatgatggcgagcgctatcagcgcgagcgtcgcggcaag

SEQ ID NO: 1459 - DNA, 401 bp, Mycobacterium tuberculosis H37Rv
aggcgcttgtggccaacgaaccggcaatcggagccatcgaccgactccagcgctcgagccgcgacgtgaccaccctgccggcggtgatatcgcgctggctgtcgagcgtgttgcccggtggggcggcacccgaggtgaccgtggaaagtggcgtggactccaccggcatgtcgtcggaaaccatcatcttgaccgcgcggtggcaacaagacgggcgatcgatccagcagaagctggtggcgcgggtggcgccggccgccgaggacgtgccggtgttcccgacgtatcggcttgaccaccaattcgaagtgatccggctggtcggagagctgaccgacgttcccgtcccgcgggtgcgctggatcgagaccaccggcgacgtgctgggaactccgttcttt

SEQ ID NO: 1460 - DNA, 401 bp, Mycobacterium tuberculosis H37Rv
agtggccgccgggcagttcaacgaggccgacgacattgggcgcggtgcgcgcaatcctgcgggactggctgatcggcgttagtcgatcacgtacgccgccgatcaccagggttggcaccgtcagaccatccaggttgaggtgtgccgaccctacttcctcgacgagcatcttcgcgcagccgccgcgccccgcggcagacgtctgggtgaacaactcatagaccagtctcgtggcgctggggtccgcgtcggcggcgaccgccagcgtggagatcacgtgccggcttaaggccctggccgcgccggggagtggaaacccgccgaacgtgttgaccaggctccggccggccagcacccgaaccggggacaactcgcgtggcaccgacagcagtttcaccttg

SEQ ID NO: 1461 - DNA, 401 bp, Mycobacterium tuberculosis H37Rv
tctgcagccgccttcaagatacgctgacgagcgccgcggcccccgcgcctggggggttccgttgttctggtgaccggcggcatagtgctgagtataccgacctgtttacaacaccccttagcgcgtgtaccgtcaaagcacaaagtacaccaatcggtttactgtaggaggtctcatgacttcactagccgagcggaccgtgctcgtcaccggcgccaaccgcggcatgggccgcgaatacgtcgctcagcttctcggtcgcaaagtggcaaaggtctatgccgctacccgcaacccgctggcaatcgacgttagcgatccgcgcgtgattccgctccaactcgacgtcaccgacgcggtgtcggtcgccgaggcagccgacttagcaaccgatgtcggca

SEQ ID NO: 1462 - DNA, 401 bp, Mycobacterium tuberculosis H37Rv
ggagtgtccaaggcggcgatgtggagcgcgacggagtcgatgcgtatcgagctggcgccgcgcggtgtgcaggtggtgggcgtctacgtggggctggtcgacaccgacatgggtcgattcgccgacgcgccgaagtccgatcctgccgatgtggtccgccaggtgctcgacggaatagaggctggcaaggaggacgtgctggccgacgagatgagccgtcaggtgcgcgcgtcgctgaatgtccctgcgcgggaacgtatcgcgcggttgatgggtaactgagtccgaaagtcgatatggccatgtccgccaaggcctcagacgatattgcctggctaccggcgaccgctcaactcgcggtgctcgccgccaagaaggtgtccagcgcggagttagtcgag

SEQ ID NO: 1463 - DNA, 401 bp, Mycobacterium tuberculosis H37Rv
cgggatcaccgtcggcgtgcatggtgaactcgtactggtctgcaccggcccgatgtgcggggcagcgcttatgattcgggtgctctttgatcttggcgatggcgttatcgatgaccgcggtcacgtctttgttgcggataaagagcaagatcgcggccttggtgtcgcgccacacaaggtagccgaatagctgcttcagcacatcgtccatggttcttgggcccgaccacactttgcattcgccaatgaagatgttgcggtcgtcgacgcgaatgagaatgtcggtcttgcctgcgccgttgaagagttcgcccccggcatcgccttcaaactgtgcgttgaggccgacgagcagcatgtctcggatttcttccccgtcgagcttggcggcgacagatggg

SEQ ID NO: 1464 - DNA, 401 bp, Mycobacterium tuberculosis H37Rv
ctgcctccgtgggcgcgatcccggtagccgtcgcaccggccccgggcccgaacaagccggtgagcgcatcccgcaccgtggggccgtatcccaccttgtcgttgtacatcatcgccacccggatcagccgcgggtaggacgaagcagcgtcgctggctcccggggatgcatagaccggttcgacgtagagcagtccgccccgggccaccgggagcgtgagcaagttgccccagcggatgcggttttggttgtcgcgtccgatgacaccgaggtcctgggacaccgccggatcggtggtgatcgcgttgttggccaacttgggcccgttgacctggcctgggatggtcaacaccgtgagattgccgtaggtcgcgggatcggaactggcgctgatgtaggcg

SEQ ID NO: 1465 - DNA, 401 bp, Mycobacterium tuberculosis H37Rv
atcaatccgacgtcgctggccgatcccgccgccatggaacagctgctgagccagggagtattcgagcccaaggcaacgccggcccagacgcaggcattggaacgactcgaaacactgctcgccctgatcgaaggctgggtgcagaccgtggtgactgcggcgctgggcgagcgaattccgggtgaggcagcgctcagcgagacgctgcgccgacgccgagccagtggcggccccgccgaacagacctttgcgacgttggtcgggctggagctgcggccacgcaaactgcgggaggccggagcgctgtgggagcgcctcacccgggccgtcggcatggacgcccgcgacgccgtctggcagcacccggacctgctgcccgccactgacgatctcgacgaccc

SEQ ID NO: 1466 - DNA, 401 bp, Mycobacterium tuberculosis H37Rv
cagcgtgatctgatcggtacgctgctcgccgagctcaccttcgacgcaccacggcggctggggttgatgcacggcgacgcccaccccggtaatttcatgctgctgcccgacggccggatgggcatcatcgacttcggtgccgtggcaccgatgcccggcggcttcccgatagagctcgggatgacgattcgactggcccgcgagaagaactacgacctcctgttgccgacgatggagaaggccgggttgatccagcgaggacgacaggtgtcggttcgcgagatcgacgagatgctgcgccaatacgtcgagcccatccaggtcgaggtcttccactacacccgcaagtggttacagaaaatgaccgtcagtcagatcgaccgctcggttgcgcagatcag

SEQ ID NO: 1467 - DNA, 401 bp, Mycobacterium tuberculosis H37Rv
cgcgggcgatcgagatcgacccgggcagtagcagtttcgactccgacgcactggaccaatcgccggcggcaagcgctgcgcgcacctcatcgcgggtgaaccacgcggcttcggcgatttcgccgtcgctgaacgagaactcctcatccgggtcacccaaggcatgaaagccaaccattaacgaccgcgggaacggccactgctggctgcccagatagcgcacatcgcgaacggtcaggccgatttcctcgcggatctcccgggcgacgcagacttcgaacgactctccggcctcgacaaagccagccaacagcgagaacatccgttccggccacgccgcctggcgagccaacacggcacgatcagcgccgtcgtgaaccaggcagatcaccgccgggtcg

SEQ ID NO: 1468 - DNA, 401 bp, Mycobacterium tuberculosis H37Rv
gcaatccagaaacgtcagccgatcgccctgggcgtcgaggtagccgtcgcggtcgacgtagacgatcccggcggtgagcagcaacgccaccacagcgacgaccacccggcgtgaaataacgcgagctggactggcccgcctttggggaatgcgcagcacgccgacaagcgcgtaaccaggctgcgcggtcagcttctcgttgagcccccgcaaccgccgccagctaccggccaccgaaatccgtcaccggttagccccaatgcacgccaaacgcacgacacaaatggtaaccacgtcaggtgtccgaccgccgaccggcgcagtcggtcagtagcatggccaactcgccgggagcgggtaactcgtcggggacgaccgtgatgccgctgcgcacgtaatag

SEQ ID NO: 1469 - DNA, 401 bp, Mycobacterium tuberculosis H37Rv
tgagtgcctgcaaagtcgacggcgtcaacgtgacgagatcgtcgctatcgcacaacggatcactcgtgctgaccggggccaggccatgccactcggacgggtcggcacctggcacaccggctttggccaaccgggccaattgcgttgccgcacaatcgcgatcggcgtcatctaccgcgcaggcaggcgcgcacaccacaacgcgtaaccggcctaccaccgccgcagccgacaacacgcgcggcgccgagaccggctgcatcgcgacgggttcgccatcgccgtcggcccactgggcaatctcgaaaaagaacgccgatggcagcaccgcctcgtgcccgcccccgcccgcgtcgctatctacggcggtcaccagcaaccgccgccgggcccgccccatc

SEQ ID NO: 1470 - DNA, 401 bp, Mycobacterium tuberculosis H37Rv
gttgatcacatattgccgataggaacctacgtcaccttcgaatggaacggctccgcgtacccagcgcgcctcgttgatgaacacccgcgattggcgatccatgccgccgaacgacgggttgtagcaggacgtctcgagccggaattcgtagccacaccccccgcgcactgtcgtcggcgacaccagcgaaatccggaagtcgggttttccgctgtcgatccgcacgaacgcgaattgcggattgtgggtccagcccttgggattggtcaacgtctggtcgaccatctgggcgaatgcgttgtcaccgccgtacattgtgggatcaagaccgttctcgatctcgacggtatacctgaacactttgacggtgccttgaccgacctggggagtagtgcccggaa

SEQ ID NO: 1471 - DNA, 401 bp, Mycobacterium tuberculosis H37Rv
tgtgcgtgcatggagtctgccccgcctggactgtgctaggggccggcgactcggcgacgtaatcggagtcggaactcatgcgcgcgtgaaccgcgacagagaaacaccgacacacgaccgacaccgtcaccgaaaggccgcttaccctcgtatgaccgcagtgaaacacacaactgaatcaacatttgccaaacttggagtccgcgacgaaatagtccgcgcattaggggaagagggcatcaaacggccctttgctatccaggaactcaccctgccactcgcgctcgacggcgaggacgtgatcggccaggcccgcaccggcatgggcaaaacgttcgcttttggcgtgccgctgctgcagcgcatcacctccggcgacggcacgagaccgctcactggcg

SEQ ID NO: 1472 - DNA, 401 bp, Mycobacterium tuberculosis H37Rv
ctacggcgagatcgatgcccgggtgaaaccgtcgaaccgcggcctgcagtccgggtgcacgctggagtcggcggcggccagctcggcggccgtatcggtgcttgaagcgtgtacgaaccaggctgacctgcggcttgtgctgttacgcccgggcaaggaggacgacgagcccatccagcgcattgtcccggaaccgggggtccggccgggttcgggcgcccgggtattggtggtatcgcagaacaacaccgccgtgtacctgcctgcaagatcaggcgcgcaaccgagagtcgacgtgatcgacgagaccggcgccacagtttcgagcacgctgctggccaagccaccgtcaacttcggccgtggcgtcgcggaccggcaacctggtgacctggtggacgg

SEQ ID NO: 1473 - DNA, 401 bp, Mycobacterium tuberculosis H37Rv
tgatggcaggtcaactcctggtgccggtcaccggcgggatcggtgtctatgacccggtcagcggtgccaacaaccgttatatcccggtgacccggccgccaagcacgtcagcagtgatcccggcagtttctggatccagggtcattgagcaacgtggcgacacactagtcgctctgggttgatcgcctatgttggcgcgagcagacgcaaaatcgcccgaaaccgatggctttcgggcgattttgcgtctgtcgcgctacaggtccaccgtgaaggtgggcagcggcctacctgtcttccagtgtttgagcagcgcctgcgccagctcgcggtaggccaccgcgcctttgttcttgcgcccagccatcaccgacgagcccgaggcgctggcctcagcgaag

SEQ ID NO: 1474 - DNA, 401 bp, Mycobacterium tuberculosis H37Rv
gatggcaggtcaactcctggtgccggtcaccggcgggatcggtgtctatgacccggtcagcggtgccaacaaccgttatatcccggtgacccggccgccaagcacgtcagcagtgatcccggcagtttctggatccagggtcattgagcaacgtggcgacacactagtcgctctgggttgatcgcctatgttggcgcgagcagacgcaaaatcgcccgaaaccgatggctttcgggcgattttgcgtctgtcgcgctacaggtccaccgtgaaggtgggcagcggcctacctgtcttccagtgtttgagcagcgcctgcgccagctcgcggtaggccaccgcgcctttgttcttgcgcccagccatcaccgacgagcccgaggcgctggcctcagcgaagc

SEQ ID NO: 1475 - DNA, 401 bp, Mycobacterium tuberculosis H37Rv
ggcggcgatggcacggtaagcgccgtagtcaacggcatgctggggcgccccggcacgacgccggtccgaccggtgccagccgttgcggttgtgcccggcggctcggccaacgtactagctcgcgcgctagggatttccgcggacccgatcgctgccaccaaccaactcatccagctgctcgacgactacggccgccaccagcagtggcgccgcatcgggctgatcgactgcggtgagcggtgggcggtgttcaacgccggcatgggcgtcgacgccgaggtcgtggccgcggtagaggccgaacgcgacaaaggcggcaaggttacggcgtggcgctatattcgcgctgcggtgcgcgcggtgctcgcctgcactcgtcgcgaaccggctcttacgctgca

SEQ ID NO: 1476 - DNA, 401 bp, Mycobacterium tuberculosis H37Rv
cggcagatgttcgcaaaacagcccaagttcgagttcaaccacgtcatcaacaacgacgacgtcgcgtgtctacgcgtcacctccatggggcccccgatcgccagccaattcgacggggactacctcggcgtgcgcgagacgatgacgttccgagctgttcccgacgccctcgccgtagttgccccgcccgcaagaaagcggatctgagctgcagaaacaaagatgtgatgggtgtgcgacacaaacgttgggcgaaactggcagcgtagtgtagtacaactgggtaagggctgtggaacgagatcgccagagtgagatagcccacgcgcttacgtaacactattgacatctgttgagcctgtgaaacgatcaaaaggttgcatgtagagaaatgtaggggt

SEQ ID NO: 1477 - DNA, 401 bp, Mycobacterium tuberculosis H37Rv
gacttcgacactgtggccgtcgtgttgacatgaattctgttggccgacagcgccttcccgtcccgggacaccaccggagaaggtcgcggcgaccagcggcatgctattggcggcgacgacggtgcctaccgcgtcggtatgcaccaccgtcggcccggtgttcggccggcattgcgcaacgcacaccaggacaccgtcgtcgcggcgaacccacatcaggtaatcggcaaacgacaagtcggcaaggagctgccactccccgaccaccgcatgcaggtggtccaccgcgctgcccggcagcaccgtgtgttcggcgagcagatcaccgagtgtggacatgagtgactatcaacgactagctgatcaccgcgataaggtcgccggcctgaatgacatcgccc

SEQ ID NO: 1478 - DNA, 401 bp, Mycobacterium tuberculosis H37Rv
ggacaggtcaccgtggaaccacatcggcggccccgcatacggaggaacgcgtagggctgattcccacgcggcagttgccgcgtggacgtcgatgatcccgtcgagggccgccagcgctgcgcgtacctcggcatcctgctcccccagcggcgcaccccgcttggcgggcggcccgcccatggggtcggtggcccgtaaggcggtgatgaagtcagccaggtcctcgacggcccgattgggctcgacgaactcggctgccgacgggttctcacccgcaacccagcggcacactgaccacggccaaccgaacccctcagccgggctccccaaccccaccggaactgggctggcaacgcctagatgcgcagcgatccgcggcagccactgttgctcggtccgaa

SEQ ID NO: 1479 - DNA, 401 bp, Mycobacterium tuberculosis H37Rv
accggggcccggcgctcgggtggactgtggcttggcgggcacggtgttgcggtttgttccgccgctggcggcgctgggctccgtcccggtcaccttcgacggcgatcagcaagcccggggacggcccatcgcaccgctgctggatgcgctgcgcgagctcggcgtcgccgtcgacggcaccggtctaccgtttcgggttcgcggcaacgggtcgctcgccggcggcaccgtggccatcgacgcgtcggcgtcctcacagttcgtgtccgggctgctgctgtccgcggcatcgttcaccgatggcctgaccgtccaacacaccggttcgtcgctgccgtctgcgccgcacatcgcgatgacggcggcgatgctgcggcaagccggagtcgacatcgacgact

SEQ ID NO: 1480 - DNA, 401 bp, Mycobacterium tuberculosis H37Rv
tcacgcaaccgggttttagcggcctcgcggtcggcccgacccttgaagatcttgccgatctccaagtgctgcagcgcaactccccactcgaagccgatcgcaaggatggtgttccacaccacgttgaagatgttgtagcgcttccagcgctggtcacgggtgacgcgcagcatgccgtatccgacgtcgtcatccataccgaggatgttggtgtatttgtggtgcacgaagttgtgggtgtagcgccagtgcttggacgatccgctcatgtcccactcccacgtcgaggagtgaatctccgggtcgttcatccagtcccactggccgtgcatgacgttgtggccgatctccatgttttcgatgatcttggccacgccaagggtcagggcacctgtccacca

SEQ ID NO: 1481 - DNA, 401 bp, Mycobacterium tuberculosis H37Rv
aatcaacgggggcgccggatccggtaatacgaaattgccctggggcgcagccagccgcacaatggtccctggctttaccccggccaccaagtgggtggacaggaagccctcgggcatcgccttcaccgtgacggtcaccatgcgcgcggacccggatgccgccggactcgacgtcagcgaatacgaccgccagcgccagcgcccgtcgaccagcagcccgatcccgatgtattggcccggctggtagtcgaaactgaagccccagcccggtttgatgaacagggtcgcggagtcttccgtctctcggcggacccctaggatgcgcccccgcaattcccgcgcggaccacagcggatttgccaggtgaaggtagtcgtcgggcaacaatggcgtcgtgatgc

SEQ ID NO: 1482 - DNA, 401 bp, Mycobacterium tuberculosis H37Rv
ggcccggacgcgcagactgcgtcacacccacggcatcgtcagagcaggtccagcagaaatggcagctcttggttggcgtaccaggcgagatcgtggtcctgggcgtcaccgaccaccagctcagcgtcctcgtcgcccaggtcagcggcatcgatgaccgcaatcgccgccatcacggccggctcagcgccggcattgtcgacatatgcggcgacaacctgatcgatcgtgattggccccgccagcctgacgaccgcgtcatcaagatcgggacggtacgtggcatcgtcgacctcggcggccagcaccgcgcgtctgggcggcagggcgtctgcggtggcgccgatgtccgccgctagcagacgcaacgacgccaacgccgcttcgcgcagcgccacctc

SEQ ID NO: 1483 - DNA, 401 bp, Mycobacterium tuberculosis H37Rv
ccgcattgtgcgatgatggccagcaaccaaaccgctgcgcaacactcgtctgccactctccagcaggctcctcgttcgatcgatgatgctggagggtgccccttgaccatcagtcctatcgcgaactcaccgggcgacaccttcgccgtcacacccgtcgtcgagtacgagccgccgccgcgaaacatcccgccgtgcgggcaatcatcgcacgcagcccggcggccgcacaccccgcagctagctcgccgacaaccaatcaggccgagcggccgggcaccggcagcggtcacctccacggccaagtcaccgcggctgcgtcaagcggggaccttcgccgatgccgcgctacgccgagtgctggaggtcatcgaccgccgccgcccggtgggccagctgcg

SEQ ID NO: 1484 - DNA, 401 bp, Mycobacterium tuberculosis H37Rv; identical to SEQ ID NO: 1482

SEQ ID NO: 1485 - DNA, 401 bp, Mycobacterium tuberculosis H37Rv
accggcgccgcccccggcaccatcagccccggtacgtccgcccagcctggtcggctttcgacagacgccgagtacatcaacaccccttgcgggccggcgacatacacagtcgacgggttggccgcgatcgccgtcagtggagtttgcaacccgcgggacggcgcgtcggagttcaccccgtcgaggtttacataagacaccggatgggcggcgtcggtgcgtgtcaccacgatgtcgtcaccggttcgccaggacaacgacaccaccgaggaacccagcccgaaacccagccgccgagggtaggtcagggcgaactggccagcctgggtctgctcgacgccggcgaggatcacctgcccaccgatcaccatcgcggcgcgcgtcccgtcacgggacagttg

SEQ ID NO: 1486 - DNA, 401 bp, Mycobacterium tuberculosis H37Rv
caccgatcaccatcgcggcgcgcgtcccgtcacgggacagttgaagatcgttgatcgcccccgggaagcggctggccaccgcggtcgaatccaccggaatccgcgcgggttgccccgatgccgggtcctgtatcgctcgcagcacgacgttggtatcgaccaccacccagaccgcgtcgtccagcgaccagctgggccgcgacaggctgtgcccgtcggcggactgcaccgcctcgccgccgaggtcgccgacccacaaagacgccgcctcatccggagccccgcgccccagcgtcaccaccgaggccacctgacgcccgctgcgtgatacggcggccgccgtctgctccggcatccgtccgaaggccccgggcacgggggtgactcgctgtgcgtccatc

SEQ ID NO: 1487 - DNA, 401 bp, Mycobacterium tuberculosis H37Rv
gtggacagcttctccatgtcgactcgcgcgccgccgtacccgcggccgattccgctctttccgccgtcggcccgagtcaccggcccgcgcagtcgtagcggcggagcgagcagattacgcaccgtgcgcgccatctccgggcgtggacccgccagcagtttggagacgagctccgtggccagctggtcgcggtcggacaccgcgacgtagcgcggatcgggaaccacggtcttgccggtggggtcggcgaagtacagggtgttgcgcttgtacgtttcttggaactgctgccagtccaggaaaaccccgttgggtaggcgatcgatgcgccaaccatcggacgtcttgaccaactcgatcgggcccggatccggcagttgaccctcggcggtctcaaacac

SEQ ID NO: 1488 - DNA, 401 bp, Mycobacterium tuberculosis H37Rv
ccgggcgtggacccgccagcagtttggagacgagctccgtggccagctggtcgcggtcggacaccgcgacgtagcgcggatcgggaaccacggtcttgccggtggggtcggcgaagtacagggtgttgcgcttgtacgtttcttggaactgctgccagtccaggaaaaccccgttgggtaggcgatcgatgcgccaaccatcggacgtcttgaccaactcgatcgggcccggatccggcagttgaccctcggcggtctcaaacacccccacatccgagagcgagccgagaatgtctgcccgcatggtcaccgaaaccttctcggcgcttcgggtttcgacgaacaccacgtggtcgatcaacaacgcgctgccggcgtcgtcccaggcgttggaagccgat

SEQ ID NO: 1489 - DNA, 401 bp, Mycobacterium tuberculosis H37Rv
tcggcgaagtacagggtgttgcgcttgtacgtttcttggaactgctgccagtccaggaaaaccccgttgggtaggcgatcgatgcgccaaccatcggacgtcttgaccaactcgatcgggcccggatccggcagttgaccctcggcggtctcaaacacccccacatccgagagcgagccgagaatgtctgcccgcatggtcaccgaaaccttctcggcgcttcgggtttcgacgaacaccacgtggtcgatcaacaacgcgctgccggcgtcgtcccaggcgttggaagccgattcggtgaggaactgacgcgccgccaggtgccggttggccgggtcggctgtggccttgaggaactcgcgtaacagcacgtcgggatccatacccgggctcggtttggg

SEQ ID NO: 1490 - DNA, 401 bp, Mycobacterium tuberculosis H37Rv
gggcccggatccggcagttgaccctcggcggtctcaaacacccccacatccgagagcgagccgagaatgtctgcccgcatggtcaccgaaaccttctcggcgcttcgggtttcgacgaacaccacgtggtcgatcaacaacgcgctgccggcgtcgtcccaggcgttggaagccgattcggtgaggaactgacgcgccgccaggtgccggttggccgggtcggctgtggccttgaggaactcgcgtaacagcacgtcgggatccatacccgggctcggtttgggcagattcgacggcaccggacgttcgacggttccgatggcttgcggggccgacgtgctgggcacactggcacagccggccagcactgcaccaaggaacaacaaaattgtcagccgcat

SEQ ID NO: 1491 - DNA, 401 bp, Mycobacterium tuberculosis H37Rv
gtacttgttgtcgaatttggacttggtcaccgagtcgttgacgttgatcgccgggaaggccagatccccggccgcggcgaattggtagagccgcagcacgccggtggtggtctcctcggtgacgcccttgaccgactcggctatcttggtccacttgtccttgtcggtctcgaagcgggtccgtagcaggttcaggaagaccttccactcggcggggtcgtcctcctcggcgggcggcaccacgccggccttctcatactgcatgccgcgcagcaccaacatggtggcgtcaccgccgtcatcgaggatcatgttggccggcttgtcggggtccggccaggtgagcatctgctcggcggcccaccagtactcttcgagcgtctcgcccttccacgcgaaca

SEQ ID NO: 1492 - DNA, 401 bp, Mycobacterium tuberculosis H37Rv
cggccaccaatgcggtaaccgtcgacggcgagaccggctggccgcgttcgtcgaccacgaagcagcggtcggcgtcgccgtcgaaagcaagcccgatatcggcgccggtgtcacgcacataggcctgcagatccaccaggttcgccgggtccagcggattggcctcgtgattgggaaacgatccgtcgagctcaaaatacgagggcaacaaggtgatcgagtcgatcaccccaaggaccgccggcgcggtgtgaccggccatgccgttgccggcgtccacggccacccgcaacggacgtagccccgaggtgtccaccagcgatcgcaggaacgccccgtagtcgaccagcacgtcctggtcggcaatggttccgggcgtcccgtcgtatcgtgcgacgccg

SEQ ID NO: 1493 - DNA, 401 bp, Mycobacterium tuberculosis H37Rv
aaccgctctagatggggccccggcgagtaggtcaccgctaccaccggcaggacgtcagtcacgcgttgagggtaaccgtcgatcgatcgaagttgagttcgcaggtgctgccagcgccgtggccagtgcgctgcgccagtgccgtagcggcgtcaagcccgccagcgcccactgcctgctcgacagcgcggaatagctcgaacgcggcgcgggccgcggaaactgcgcgctgctgaccggacgcacccgctgtgggtcggcaccgcattcttcgaacaccgcgcgggcttgaccgaaccgggagaccacgccctcgttagcggcgtgcaacacgcgtccgcgcacgcccgcgtcggccaacgccagcagcgcctcggccaggtcggcgacgtaggtcggcg

SEQ ID NO: 1494 - DNA, 401 bp, Mycobacterium tuberculosis H37Rv
gcctgacctcgttgaagatcaacgatttgccgaacaacgctcccggtcgatcaactacgccgagttgaccgccgagttggaattggcactggccagcaagaccgccaccgaatgggtccagttgctgcaggcaaacggcctcatggcctgcctcgcccatacctggaaacaggtcgtcgacaccccccttttcgccgagaacgacctcaccctggaagtcggtcgcggggcggacaccatcacggtgatccgcacaccggcgcgctacgccagcttccgcgcggtcgtcaccgatcccccgcccaccgccggcgaacacaatgccgtgtttctggcccggccctgacgctgtgaccattccgaggagtcaacacatgagcaccgcagtcaacagctgcacc

SEQ ID NO: 1495 - DNA, 401 bp, Mycobacterium tuberculosis H37Rv
ttgccggacggcatcctccatcacgaactgcacgaagtgatcgtcggcgggacggttatcgcgatcctgttgatgtggtcaaagctgcccgccaaggtgcgtatcattcccggcccactggtagccatcgcgggcgcgaccgtgcttgcgttgctacccgtgctacaaaccgaacgaatcgacctgcagggcaacttcttcgacgcgattggcttgcccaaacttgccgaaatgtccccgggaggacagccgtggtctcatgagatcagcgccatcgcgctcggtgtcctcaccattgcgctgatcgcaagcgtcgaatcgctgctgtcggcggtcggtgtcgacaagctgcatcacggcccgcgcaccgacttcaaccgggagatggtcgggcagggcag

SEQ ID NO: 1496 - DNA, 401 bp, Mycobacterium tuberculosis H37Rv
cgggtttccggcccatccaaccatcttggagccctcctaatctccgtgctagtcgcgggttaacttacccgcaagccgctgcagttccgcatccttggccgccacgacgtcggccagccggtcctggaatgcgacgatccgggccctcagctgggggttggcggctcccagcatccgcaccgccagcagtccggcattaccggcgcccccgatggacaccgtggccaccggaaccccggccggcatttgcacgatcgacagcagggagtcaaggccgtccagcctgcccagcggtaccggcaccccgatcaccggcagcggcgtcgcggcggcgaccataccgggcaagtgcgcggccccgcccgctccggcgatgatcacctcgagaccgcgctcggccg

SEQ ID NO: 1497 - DNA, 401 bp, Mycobacterium tuberculosis H37Rv
gttccccgacgagttcgcccgcaaccccgacaaggccctggaatccgcccttaccgcgggcggcatcgccgaagtcttcgaggacgtcttggagggcggcttcgaggacggcaacgtcaccctgctgcgggcctggcgtaaccgggccaaccggttcgctcagctgggcgactcgtcggagcccagggtgtcgaaaacctcgtgatacagcaacgcatgcacctcccgcaggcgcggaatgttgtagaactcgagcggatcttgtgacgcggactcgataatcaacgtcccggtgcgaaaaatccgctcgaagatccggtcccggaactccacgctgttgatccgtgctagcggtatgtcgatcccgctgcgggtcagcacaccatgccggaacatcaccc

SEQ ID NO: 1498 - DNA, 401 bp, Mycobacterium tuberculosis H37Rv
aatcttttggggacgccagctccgcgcgagttaacgcaaatgcaccacgtcgcccgctgaaacaactaccgttcgaccgccgacgtccagacacagccgaccctggtcatcgatgtcacgcgcgatcccgacgacgtcctggccaccggggagctcgacgcgcacgcgcgacccaatggtcaggctgcgagcacggtagtcggccgccagttgtgggttggcgttgcgccactggatgatccgagcttcgagctcgcgcaacagcctgctggctatgcggttgcggtccggtgccgccactccgaggtccagcaatgaggtcgcgtcgggatcaacctcttcgggggcctgggtgacgttgagtcccacaccgagtaccacaaacggctgcgcgacctcgg

SEQ ID NO: 1499 - DNA, 401 bp, Mycobacterium tuberculosis H37Rv
caatatccccatcgtcatgctggtggacgtcccgggcttcctgccgggcaccgaccaggaatacaacggcatcatccggcgcggcgccaagctgctctacgcctacggcgaggccaccgtgccaaagatcacggtcatcacccgcaaggcctacggcggtgcgtactgcgttatgggctccaaagacatgggctgcgacgtcaacctggcgtggccgaccgcgcagatcgcggtgatgggcgcctccggcgcagtgggcttcgtgtaccgccagcagctggccgaggccgccgccaacggcgaggacatcgacaagctgcggctgcggctccagcaggagtacgaggacacactggtcaacccgtacgtggccgccgaacgcggatacgtcgacgcggtga

SEQ ID NO: 1500 - DNA, 401 bp, Mycobacterium tuberculosis H37Rv
ccggaacgcaacgcattgtggccgcggattgcgttgtcgttgcctgtgattcgatgctctacatcgaaggcaggctactcggcaagccagcgtcaatcgacgaggcgcgcgagcagtggcggtcgatggcgggccgggccggccaactctatacgggccacggtgttatccggttgcaggacaacaaaaccgtgtaccgtgctgctgaaacagcaataaccacagtatatttcggaacaccttcggcctccgatctggaggcttacctggccagtggggagtcgctgcgggtcgcgggtggattcaccctggacggtctgggcggctggttcatcgacggcgtgcagggcaatccgtcgaatgtgatcggcttgagcctgccgttgctgcggtcgctcgtg

SEQ ID NO: 1501 - DNA, 401 bp, Mycobacterium tuberculosis H37Rv
ggccgcctatgcgttgtgggtgttcacgctgttcggtcacgccgacgtgcgactcctcaacggcggccgtgacctctggctcgccgagcgccgggaaaccaccttggacgtcccgaccaagacctgcaccggttatcccgtcgtgcagcgcaacgatgcacccatccgcgcattcagagacgacgtgctggccatcctgggcgctcagccgctgatcgacgtacgctctcccgaggagtacaccggcaagcgcacccatatgcccgattaccccgaggaaggggcgctgcgggccggtcacatccccacggcggtgcacattccgtgggggaaggccgccgacgaaagtggacggtttcgcagccgcgaggaattggaacggctctatgacttcataaacc

SEQ ID NO: 1502 - DNA, 401 bp, Mycobacterium tuberculosis H37Rv
ctcgacaagccgcgccacgtcgaagcacaggtgatcgccgaccagcacggcaacgtcgtcgtcgccggcacccgggactgctcgctgcagcgccgctaccagaagctggtcgaggaggcgcccgcaccgttcctgaccgactttcaacgcaaagagatccacgactcggccaaacggatttgcaaagaggcccattaccacggcgccggcaccgtcgaatacctggtcggtcaggacggcttgatctcgttcttggaggtcaacacgcgccttcaggtagaacacccggtcaccgaggaaaccgcgggcatcgacttggtgctgcagcaattccggatcgccaacggcgaaaagctggacatcaccgaggatcccaccccgcgcgggcacgccatcgaatt

SEQ ID NO: 1503 - DNA, 401 bp, Mycobacterium tuberculosis H37Rv
gatcccaccccgcgcgggcacgccatcgaattccggatcaacggcgaggacgcggggcgtaacttcctaccggcgcccgggccggtgacaaagttccacccgccgtccggccccggtgtgcgggtggactccggtgtcgagaccggctcggtgatcggcggccagttcgactcgatgctggccaagctgatcgtgcacggtgccgaccgcgccgaggcgctggcgcgggcccggcgcgcgctgaacgagttcggtgtcgaaggcctggcgacggtcatcccgtttcaccgcgccgtggtgtccgacccggcattcatcggcgacgcgaacggcttttcggtacatacccgctggatcgagaccgagtggaataacaccatcgagccctttaccgacggcga

SEQ ID NO: 1504 - DNA, 401 bp, Mycobacterium tuberculosis H37Rv
cggcaagcggccgcgtcgtccgcaagtggtcgacggggtcacgataggtgtcgcccatggcctcctccgtttccgtcctattccgccatttctgcccattaccaggcactaccatcaacggtagaactcgtcgaacgggttgtggagggatctgacccatttatttgttgaccgcggccgacctggccgacggctcacggcgccatgaccgggccggcgatcggtgggacgcctatgcagagcgtcagcaccatcagcgtcaacaaaaaccagccggcgccgtgccatccccaccaggtaccttccgcacgccatacccggtaggtgcgcagaaacgcccacagcccggccgcacacaggatcagcgggccccccagcgccagcaggatccgctggggcgg

SEQ ID NO: 1505 - DNA, 401 bp, Mycobacterium tuberculosis H37Rv
ctaggcgcgcgggggcatcatctggttgagacggatcaagaggagtgatagccacgaacgccgacaacaaatgcccaaccgcctcgggattgattcgcgccgaatatccctggaccacaccacgagactccagccggcgcactcgcgattggaccgccgagaccgacagcccggctcgcgtggccaactctgacagcgtcgcacgtccgtcggcggccagttcgcgcaccaggatccgatcgatatcgtcgagcgcctcgttcatggccggagactatcgcaacggcagtgccgcatgagccgctcgaaaagactgcagactggccagctgcgcgcgcgcttcgccgccgggttgtcagccatgtacgccgctgaggtgcccgcctacggcacgctggtcg

SEQ ID NO: 1506 - DNA, 401 bp, Mycobacterium tuberculosis H37Rv
tgctgttgggcggcgccgagcgtggtgcgcaactcgtcgacgacccgcgggttgcgttgttgtcggcgacgggttcggtgcggatgggccagcaggtcggtccacgcgtcgcccggcgcttcgggcgggtgctgctggagttgggcggcaacaacgcggccattgtggcgccgtcggccgacctggagctggcggtgcgcggcatcgtgttcgccgcggccggcaccgcaggtcagcgctgcaccagcctgcgccggctgatcgtgcaccgctcggtggctgacgatgtggtggcacgcgtcgtcggcgcctatcgccagctggcgatcggtgacccgtcggccccggacacgctggtaggcccactcatccacgaggccgcctaccgcgacatggtggca

SEQ ID NO: 1507 - DNA, 401 bp, Mycobacterium tuberculosis H37Rv
aacgcaccgctaccgcagtggtacccaccgacagcacattgttggtcgagcggtttcgtgacgagctgggcgattggcgggtgatcttgcattcgccgtatgggctgcgggtgcacggaccgctcgcgctcgcagtcggccggcggctgcgcgaccgctatggcatcgacgagaagccgaccgcctccgacaacggcatagtggtgcgcctaccggacaccgtgtccgctggcgaagacagcccgccgggtgccgaactgttcgttttcgacgccgacgagatcgacccgatcgtcaccaccgaagtggccggttcggcgctgttcgcgtcacggttccgggaatcggcggcccgcgctctgctgctgccccgccggcaccccggccgccgctcgccgctg

SEQ ID NO: 1508 - DNA, 401 bp, Mycobacterium tuberculosis H37Rv
ccaccgaagtggccggttcggcgctgttcgcgtcacggttccgggaatcggcggcccgcgctctgctgctgccccgccggcaccccggccgccgctcgccgctgtggcagcagcggcagcgcgccgcccggctgttggaagtggcccgcaaataccccgacttcccgattgtgctggagacggtccgcgagtgcctgcaggacgtctatgacgtcccgatcttggtcgagctgatggcgcggatcgcccagcggcgggtgcgtgtcgccgaagccgagaccgccaaaccttcgccatttgcggcatcgctgttgttcggctacgtcggcgccttcatgtacgagggcgatacgccgctggccgaacggcgcgccgccgcgctcgcgctggacggcacgttg

SEQ ID NO: 1509 - DNA, 401 bp, Mycobacterium tuberculosis H37Rv
tggggctgccggccagcttcaccgaggcggtagccgacccgctgggcgaactactgggccgctacgcacgcacccacacaccgttcaccaccgctgcggccgcagcccggttcggtcttgggctgcgggtgaccgccgacgtgctgggccggctggccagcgatggccggctggtgcgcggcgaattcgtggccgcggccaaaggatccgccggcggcgagcagtggtgtgacgccgaggtgttgcgaattctgcggcgccgctcgctggccgcactgagggcgcaggcagagccggtcagcaccgccgcctacggacgcttcctgccggcctggcagcacgtttccgcgggcaactcgggcatcgacgggctggccgcggtcatcgatcagctcgccggc

SEQ ID NO: 1510 - DNA, 401 bp, Mycobacterium tuberculosis H37Rv
ccgcggccacgttgcggcggcatctggccggtcgcacgttgacacgttgcgacatccgagtgccacggtttgccgccgtcgacctcaccggcgaggtagtggacgaggtgatcagtcggggcaagcacctgttcatccgaaccgggacagccagcattcattcgcatctgcagatggacggcagctggcgggtcggcaacaggccggtgcgggtggatcatcgggcgcgaatcattttggaagccaaccagcaagaacaggccatccgggtggtcggcgtcgacctaggcctgttggaggtcatcgaccggcacaacgacggcgccgtcgtcgcacacctaggacctgatctgctggccgacgattgggacccgcagcgtgcagccgccaacctgatcgtt

SEQ ID NO: 1511 - DNA, 401 bp, Mycobacterium tuberculosis H37Rv
gttacgcccggtcaacagcgccgcacgggtcggcgagcacaccgcggtcacatgaaaacggttgtagatcaacccattctgggctagccgggacagcgtcggggttcggatcgcgccgccgaatgtatccggtccgccgaacccagcgtcatcgatcaacacgatcagcacattcggtgcgtcgtcgggcggaaagggaccggggacaatcgaccagtcgccgaccgactctgccatggtgcggccaaccacgccaccaaagcggcgctgcggtagcggcagccgggtgcggtctgggttgaacttgcccatcgcctctcgcaacgccgcacccaggcttcgcaacgtcgaacgactcagctccgcaaccgatttcattggagagctagccaacgcctgcc

SEQ ID NO: 1512 - DNA, 401 bp, Mycobacterium tuberculosis H37Rv
caccagcgcggtctgcgcgacgtgtcgcccccgaggcatggtcgccaagaaatgtggcttgtcgacgacgacgatgtcggcgtcttgatgcagcactgggacatcgaagggcaccggcacctcgtcgggcaggtcgcgatacaggtgcacaaccgaaccgggcggcagcaccgtgccactgtcgaccaccgcaccgtcgtcgtcgaccacctccccggccagcaccttcgcacgggccgccacgccaaaccgtgcggtcagctcggctaacaccgacccgccaagcagtcgcacccgcaccggccccagcacgtcgtgcacgctaagcaaacgatcctctggccgcaacgccacacgagaccctctcagtaagtggaaatctcgtcctcggtcggtagcac

SEQ ID NO: 1513 - DNA, 401 bp, Mycobacterium tuberculosis H37Rv
cggcgtcgatgaccgattgcggcaccccgaccgcggcgatctcgggcctggtgaaaaccgtcgcggccaccgtgcgtaaccggatcgggctgacgccctcccccagcgcgtggtacatcgcgatgcggccctgcattgcggcgaccgacgccaggggcagcaaacccgtgcagtcgcccgcggcgtagatgccggtcgccaacgtccgcgacacccggtccacggtcaggtaattgccccggccaagctggatgccgacccgttccaggcccaggccgctggtgttgggcaccgacccgatggtcatcagggcgtggctgccctcgacggtgcgaccgtcggtcatcgtgacgagcaccccggccccggtgcgggtgaccgatgctgcccgggcatttttg

SEQ ID NO: 1514 - DNA, 401 bp, Mycobacterium tuberculosis H37Rv
ggcggccagcgtcttgacccgggcatggatttgcggcaacgagatcttggcgtcgtcgaagtcgatatgaaagcccaggtgcggcgctcggcgcagttcggtacgcagcccggtggaggcgatgaacgtcttcgacggcacacagtcgtccagtacggcagccccgccgatgccgtcgcagtcaatcacggtaacttgggttgtttccgggtgtgaggtggcggccaccagtgcggcctcgtaaccggccgggccgccaccgaggatcacgatgcgggtcaccacagcccataacctagctcggcgacgatgcacgccgcgcagcggcgtgaggaggagccgagcagtccaacacagctcggcgacgatgcacgccgcgcagcggcgtgaggaggagccga

SEQ ID NO: 1515 - DNA, 401 bp, Mycobacterium tuberculosis H37Rv
tcggacagggccagtgatcgtgcgccggcgatatcggtcggcccgggatggaccatcacggccaccgcaacgtcatcgaacgtcccggcctgcagcatcagcgccttaccgccgccggactcctcggcaggggtccccagcagagccacggtcaagcccaggtcgtccgccacctcagccagtgccagcgcggtgcccacagcggaggccgcaataatgttgtgcccgcaggcgtgtccgatcccgggaagcgcgtcgtactcggcgcacactccgacaaccaacggtccgctgccgtagtcggcgcgaaacgccgtgtccaacccaccggcggccgtggtgatctcgaaaccgcgttcggcgaccagcgcctgagccttggcgcagctgcgatgctcggc

SEQ ID NO: 1516 - DNA, 401 bp, Mycobacterium tuberculosis H37Rv
tggtgtacgcctacgaggaagcgatcgggcactgcgtcgaccccaccgcggtgcgtgacaaagacggcatcagcgccgcggtgttggtgtgcgatctggtggccgcgctcaaaggccagggtcgttcggtgaccgacgcgctcgacgagctcgcccgatgctacggcgtgcatgaggttgccgccctgtcacgccccgtgagcggcgccgtcgagaccaccgacctgatgcgacggctccgcgaggacccgccgcgtcggctggccggtttccccgccacggtcaccgatatcggcgacacgctgatcctcaccggcggcgacgacaacatgttggtcagggtggcggtgcggccttctggaacagaaccgaagctgaagtgctacttggagattcgctgc

SEQ ID NO: 1517 - DNA, 401 bp, Mycobacterium tuberculosis H37Rv
ctggcaacacattcgggttgacgaagaacacctgccccgtcaacggcggcgcgctgcccaacctgggttctgagttgctcagcgccggttacacattcatggggttcgccgaagacttgcctgcggtcggctccacggtgtgcagtgcgggcaaatacgcacgcaaacacgtgccgtgggtcaacttcagtaacgtgccgacgacactgtcggtgccgttttcggcatttccgaagccgcagaattaccccggcctgccgacggtgtcgtttgtcatccctaacgccgacaacgacatgcacgacggctcgatcgcccaaggcgacgcctggctgaaccgccacctgtcggcatatgccaactgggccaagacaaacaacagcctgctcgttgtgacctgg

SEQ ID NO: 1518 - DNA, 401 bp, Mycobacterium tuberculosis H37Rv
ccatcggcgaaggccccctcgagccgcgaacttggcgtgccgtggaagtagaacgctgggtagccggtgctatcaccccattccaggtaggcaagcgcccgcccgtcgggcagcatgagcacatccgcctcgtcggtgcgaatgcgctcgggcagcgatggcggtggcccggtcaagagcacaccagcgatggtatgccgatcagagtcgattcagcgcgcgtgccatgcacgagtcctcgaggaaccgatagcgcctaggctgggactgccgcaaccacagccgatccagcgccgaacgcacgatccggcgaacgggtgtgcgggtaacagccttgtcgatgtcgatggtggaggcgctgtcgccgttcatgacaggttcccttcaagcgtcctgcaagc

SEQ ID NO: 1519 - DNA, 401 bp, Mycobacterium tuberculosis H37Rv
gcgatgaatccgcacccccgcaccgtgctgtacgcgtgcgcccgggcgggacctgcccgcaccgagtcgccatgccgctaaccccactgccatcgcatcgatgtcgcccattgtgccgctcgcgcccgccgtgacggtttccgaatgcgaaccgatcggcaacggtttcgacaagtcacctccctgcgcggcaaccaaccggcgaaaccggtccattgcggtgccgtcccgcagcgtctgggccgggtcccggccgtggatcccggcaagctcgagcatctcgccggccagccgcaacgtcagctccaccacgtcgggcggtccgccgccggccagcacctccagcgcctcggccacctcgagcgcattgccgacggttcgacccagcgggcagttcatct

SEQ ID NO: 1520 - DNA, 401 bp, Mycobacterium tuberculosis H37Rv
gccacctctcccccgcaagcgggcggtacccccacctcatcgctgcggccccctcgtcgcttcgcggctgggggtgcccccactgcatcgtcggcggcggcgttgatctgccaacaccgatacgacgtggtgatcgtcggcgcgggcggtgccgggatgcgcgccgcggtcgaggcgggtccgcgggtgcgtaccgcggtgctgaccaagctgtatcccacccgcagccacaccggcgcggcccagggcggcatgtgcgccgcgctggccaacgtcgaggacgacaactgggagtggcacacgttcgacaccgtcaagggcggcgactatctcgccgaccaggacgccgtggagatcatgtgcaaggaagccatcgacgcggtgctcgacctggagaagat

SEQ ID NO: 1521 - DNA, 401 bp, Mycobacterium tuberculosis H37Rv
ctcgacctggagaagatggggatgccgttcaaccgcacccccgagggccgcatcgaccagcgccgcttcggcgggcacacccgcgaccacggcaaggccccggtgcgccgggcctgctacgcggccgatcgcaccggccacatgattctgcagacgctgtatcagaactgcgtcaagcacgacgtcgagttcttcaacgagttttacgcgctggatttggctttgactcaaacgccgtcgggcccggtggccaccggggtgatcgcctacgagctagcgaccggtgacatccatgtctttcacgccaaggccgtcgtgatcgcgaccggcggctcgggccgcatgtataagaccacgtccaacgcacacaccctgaccggcgacggcatcggcatcgtgtt

SEQ ID NO: 1522 - DNA, 401 bp, Mycobacterium tuberculosis H37Rv
ggccgataaggagggccccgagctgcgcagcgatgtccgccttgatttcaaacccgtcgtgcagacccgttacgaacccaaggaacggaagtactaatgagcgtcgagccggacgtcgaaactttggatccgcccctaccgccggtaccggacggcgcggtgatggtgaccgtcaagatcgcccggttcaaccccgacgaccccgacgcgttcgcggccaccggcggctggcagagcttccgggtgccctgtttgcccagcgatcggctgctcaacctgctcatctacatcaagggctacctcgacggcacgctcaccttccggcgatcctgcgcccatggggtgtgcggctctgatgccatgcgcatcaacggggtgaaccggctggcctgcaaggtgct

SEQ ID NO: 1523 - DNA, 401 bp, Mycobacterium tuberculosis H37Rv
tcaacgcgcaccgcttcatcttcgacagccgcgacgaggccgccgccgagcgcctcgacatcctcaacgaggtcgacggggtgtggcgctgccgcaccacgttcaactgcaccgaatcctgcccacggggcattgaggtgaccaaggcgatccaggaggtcaagcgcgcgctgatgttcacccgctgagggcttgcgcgagcagacgcaaaatcgcccgaaaaccagtggttttgggcgattttgcgtctgctcgcgcagccgggtctacagcgttgccaggtgctgtttggttgcgccaggaaccgcagtcaacgcaatcgactgatcgaaggtgacaaatcggccatcatgagcgaccgcgagggccagcaagtacgcgtcggtgacctgtttggggct

SEQ ID NO: 1524 - DNA, 401 bp, Mycobacterium tuberculosis H37Rv
caacgcgcaccgcttcatcttcgacagccgcgacgaggccgccgccgagcgcctcgacatcctcaacgaggtcgacggggtgtggcgctgccgcaccacgttcaactgcaccgaatcctgcccacggggcattgaggtgaccaaggcgatccaggaggtcaagcgcgcgctgatgttcacccgctgagggcttgcgcgagcagacgcaaaatcgcccgaaaaccagtggttttgggcgattttgcgtctgctcgcgcagccgggtctacagcgttgccaggtgctgtttggttgcgccaggaaccgcagtcaacgcaatcgactgatcgaaggtgacaaatcggccatcatgagcgaccgcgagggccagcaagtacgcgtcggtgacctgtttggggctg

SEQ ID NO: 1525 - DNA, 401 bp, Mycobacterium tuberculosis H37Rv
agcctgctgagcaccagcgcgaaacgcgtctcgccgggttcccagcagcccaagtcggcctgcacgaggttgagccgatcggccacgcctcgacgcacggcctcgctgtccagctgcagcagcgcgacatcggacacatcgattgcggtgacctggcggccgtgggcggccaacgccagtgcggtacccgatcgaccgctggctaactccagaacgggaccgtccggaacgcctgctctgaggacatcggcgagccaaggcaccggggcaaacggcgcgtgcgccgaacccgcgcgttcgtatcgcgcgttccagtcgacgcggttggggtgctcccgcagcgccggatccgtctgcacgctcatggccgattggccacccactcaacaccgtcgagtgcg

SEQ ID NO: 1526 - DNA, 401 bp, Mycobacterium tuberculosis H37Rv
cgacgacacgaaacctttggttgcacttcgcccggcacggtgccggcatccaacacccggtcatcgtccgcggcgacggcgtcaccatcttcgacgaccgcggcaagagctatctggacgccttgtccgggctgttcgtggtgcaggtcggttacggccgggccgaactcgccgaggcggccgcgcggcaagccggcacgctggggtatttcccgctctgggggtatgccaccccgccggcgatcgagctcgccgagcgcctggcccgctacgcgcccggggacctaaaccgggtgtttttcaccagcggcggcaccgaggccgtcgaaaccgcctggaaggtggccaagcagtacttcaagctcaccggcaaaccgggcaaacaaaaggtcatttcacgc

SEQ ID NO: 1527 - DNA, 401 bp, Mycobacterium tuberculosis H37Rv
gaccaggcgaccaagcaaaccttcaccgatgacgaacgcgcacgactgctaggccaggtatccgcggcgctctttgaggccgggctgtactgccgcaccgacgaccgcggggaccccgtcgtccaggtggctcccccgctgattagcggacagcccgagttcgacaccatcgaaaccatcctgcgcagcgtgctcaccgacaccggacgcaaatatcttcatctgtaactttcgtcccgccagtcacagcgcggctcctcgcggtcgggccgccgatcacctactctgcacagacgatggccttcttacgttcggtatcgtgcctggcagcagccgtgtttgcggtaggcaccggaattggtctacctaccgcggccggcgaacccaatgccgcaccggcg

SEQ ID NO: 1528 - DNA, 401 bp, Mycobacterium tuberculosis H37Rv
tcatctgtaactttcgtcccgccagtcacagcgcggctcctcgcggtcgggccgccgatcacctactctgcacagacgatggccttcttacgttcggtatcgtgcctggcagcagccgtgtttgcggtaggcaccggaattggtctacctaccgcggccggcgaacccaatgccgcaccggcggcgtgcccgtacaaggtgtccaccccacccgccgtggactcgtcggaggttcccgcggccggtgaacccccactgccgctggtggtaccccccaccccggtcggcggcaacgcgctgggcggctgcggcatcatcaccgcccctggcagcgcgccagcgcccggcgacgtctcagccgaggcctggctggtggcggacctggacagcggcgcggtgat

SEQ ID NO: 1529 - DNA, 401 bp, Mycobacterium tuberculosis H37Rv
attggatcgacggaacgatgatgggtccggcgccgccggacgcgtggatgttcgcgacagtgaattcgggaatgatggtgctggtgtaggagaagccgagcaggccctggtagtcgccccgccagaaggcgccgttgctgtagttgccggagatgaaggcgccggtgttgacgtcgccggagttggccaccccggtgttgatgtcaccggtgttcaaccaacccgtgttgacactgcccgggttgaaaccgcccgtattggcctgccccgcgttgaaactgccggtgttgtagctacccgcattgaccacacccgtgttgaacccacccgcgttgaacaaccccgtgctggcaatccccgaattaccgatcccggtgttataactccccgaattgaacacc

SEQ ID NO: 1530 - DNA, 401 bp, Mycobacterium tuberculosis H37Rv
cgccgttgccgccattgccgccgttaccgccgttgggggtgatgccgtcggtgccgtccaagcccgtcaaggagccggtgccggccttgcctccggtgccgccgacgccggcgttgccgccgttgccgccgttgccgccggtaccggggtttcctacggtgccgccgcccggcagcatggccccgctgtttaggccgttttcgccggccccgccgtcaccggctttgccgccatcgccgccgttgccgccgtcgccgccggtgcccgtggcgccgtcggtgtacccggccgcctgcgccttgccgcccgcgccgccattgccgccggcgccgccgtcgccaccgttaccaccgctaccgccgttctcgccgtttgcgccgttagcattggggccggcgccg

SEQ ID NO: 1531 - DNA, 401 bp, Mycobacterium tuberculosis H37Rv
cgtcgccgccggtgcccgtggcgccgtcggtgtacccggccgcctgcgccttgccgcccgcgccgccattgccgccggcgccgccgtcgccaccgttaccaccgctaccgccgttctcgccgtttgcgccgttagcattggggccggcgccgtcggcgcctctctcgccggcgccgccgatgccaccctggccgccgttaccacccttaccaccgttgccgccgtggccggccagtgttccgccggcgccgcccgccccgccgttgccgccagccccaccgtcggtgcccgaggtgccggaatcaccgctggtagggcccggcgtaccggcttggccggccgcgccgttgccgccggccccgccattgccgccattgccgacattcccgccgctgccgccc

SEQ ID NO: 1532 - DNA, 401 bp, Mycobacterium tuberculosis H37Rv
ttaccgccattaccccacaacaaccccccggccccaccgggctgcccggtccccggcgccccgtgaacgccatcaccgatcagcgggcgccccaaccacagctgtgtgggcgcgttgatcgcacccaacacttgctgctccagcgcctgcagcggtgatgcattcgccgcctcggcagtcgcatacgcgctgccagccgcggtcagcgagcgcacaaactgctcatgaaacgtcgccacccgggcgctcaacgcctggtactcctgcgcgtgggtaccaaacaacgccgcgatcgccgccgacacctcatcaccggcggccgccaacacctgcgtcgtcgggcccgctgccgccgcattcgccgcgctgatggcctgcccaatcccggtcaagtccgccgc

SEQ ID NO: 1533 - DNA, 401 bp, Mycobacterium tuberculosis H37Rv
ccaacgccgataccgatcagcagcgcaccacggcgccagaagttgacccccgccaggatcggccactgggcgccaacagtgcgccgcaaaacggccctcacggtcatcgccgctcagccagctccacgacacttgtcagcaaggacgcccggggcgaagggcgttcgccaagtctgtagatgagctgcgggagatggccgacggcgagggttgagaagcgtcaacttcgatcgtgatgcctgggaggacttcttatttcatacgcgatcggtgatgccgccctgaagccgaggtcgacggcagcgcggagacgttcgagaagacgtcgcggtgaggtcaatcccggtgtgaccaacggccggttacggcccggtgcccgcgaacagcaggcccgacagctg

SEQ ID NO: 1534 - DNA, 401 bp, Mycobacterium tuberculosis H37Rv
gtgcagtgtgccgacgttggcaatacccgaacccgcgcctgccaaagcggtgtgcgcctggttccaccaccccgacatgttcgcgccgaagttgccgaaacccgagcccccgcccgccccggtgttgaagaagcccgacgacggaacggtggtggtgttcccaatgcccggggtgggcgggatgttgatcagcgggatgtcgccggcgatgacgtagagttcgccgtcggcgttcgccgggatctccgggaacgtgatcgccggaatggtggcgccgggggtgccgacgaacacatccaggttcagcagcgagttcgccgggaacgtcagaccaccggggaacagggtgatcgcgtcgatgctgcccggcacctggaaacccaacgggatctggtgaatat

SEQ ID NO: 1535 - DNA, 401 bp, Mycobacterium tuberculosis H37Rv
agtgaaaccaccggcattgaaaagcccagtactgcccgttccgctattaccgatgccggtgttgaagctgcccgagttgaacaacccccagtttccggtcccggagttgaagaacccgatgttgccggtgccggagttgaacaggccaatgttgccggcaccggagttcaagccgccgatgccggtctggttgtcgccggtcagcccaatcccgaggttgttggtgccggtgttggcgaacccgatgttgcccacacccatgttggccaggccaacgttggtgctgcccgcattgcccaacccgatattgccgatgccgagcgccgcccccaggcccgaattgccaaacccgacgttgccgtggccgatattgccgaagccgacgttggcgttcccgatat

SEQ ID NO: 1536 - DNA, 401 bp, Mycobacterium tuberculosis H37Rv
tgttgacgagttcgtggatgtcgaacagcgacatgccgggaatatcgatctgatcgatgtggacgggaccgaggttgagggtttcgttgatgtccaccagggtgctgccggtgatttcgatgctgtaggagaagccgaccagcccgtggtgatcaccggtccacagcgcgccgttgttgaagctgccggagttgaacgcgccggtgttgacattgcccgtgttgaagccgccggtgttggtgtggccggcgttgaaccagccggtgttgacattgccagggttgaagccgccggtgttggtgttgcccgcgttgaggctgccggtgttgtaactaccggcattggccagacccgtgttgaaactcccggcattgaaaagcccggtactgcccgttccgctg

SEQ ID NO: 1537 - DNA, 401 bp, Mycobacterium tuberculosis H37Rv
cagcgttgccgaagtaaggggtatggcgacctgtatctgaaccgagattgtgggatcgggaaattcatttgggaacgcgtcgtggaggaactgaagcttgaggttaacgttgaacggattgagctggacgtttgagacggtgatcgggccgaacctgaattgtccggtaatgcccagcgcagaaagcagggtggtggccggggcggtgaagccggcgtcggcggcaccgtcgaagtcgatgtggattgccggaatggggatgtccggcacggcgaagccgtagttcgcttgtcccgtgaggcccaggtggatggggggaaggatcgtggtgtccgggatgataatggggccgatgccgccggttgaagtccagtggatcgggaattcgggaatcgtgatgc

SEQ ID NO: 1538 - DNA, 401 bp, Mycobacterium tuberculosis H37Rv
acattgcccgaattggcgacgccggtgttggcgttgccggtgttgaaccagccggtgttgatgctgcccgggttgaaaccaccggtgttggtgtcacccacattgaagctgcccgtgttgtacgacccagggttggccacaccggtattgaaattaccggcattgaaaagcccagtactgcccgttccgccattgccgatgccggtgttgaagctgcccgagttgaacaacccgaagttcccggtcccggagttgaacaacccgacgttgccggtgccggagttgaacaacccgatgttgccggcaccggagttcaagccgccgatcccagtctggttgtccccggtcagcccaatcccgaggttgttggtgccggtgttaccgaacccgatgttgcccac

SEQ ID NO: 1539 - DNA, 401 bp, Mycobacterium tuberculosis H37Rv
aattggcgacgccggtgttggcgttgccggtgttgaaccagccggtgttgatgctgcccgggttgaaaccaccggtgttggtgtcacccacattgaagctgcccgtgttgtacgacccagggttggccacaccggtattgaaattaccggcattgaaaagcccagtactgcccgttccgccattgccgatgccggtgttgaagctgcccgagttgaacaacccgaagttcccggtcccggagttgaacaacccgacgttgccggtgccggagttgaacaacccgatgttgccggcaccggagttcaagccgccgatcccagtctggttgtccccggtcagcccaatcccgaggttgttggtgccggtgttaccgaacccgatgttgcccacacccatgttg

SEQ ID NO: 1540 - DNA, 401 bp, Mycobacterium tuberculosis H37Rv
ggcgacgccggtgttggcgttgccggtgttgaaccagccggtgttgatgctgcccgggttgaaaccaccggtgttggtgtcacccacattgaagctgcccgtgttgtacgacccagggttggccacaccggtattgaaattaccggcattgaaaagcccagtactgcccgttccgccattgccgatgccggtgttgaagctgcccgagttgaacaacccgaagttcccggtcccggagttgaacaacccgacgttgccggtgccggagttgaacaacccgatgttgccggcaccggagttcaagccgccgatcccagtctggttgtccccggtcagcccaatcccgaggttgttggtgccggtgttaccgaacccgatgttgcccacacccatgttgccga

SEQ ID NO: 1541 - DNA, 401 bp, Mycobacterium tuberculosis H37Rv
cccgatgttgcccaccccggccaggcccgccgccagacccgcattgcccaacccgaagttggcatcgccgatattgccgaacccgacgttgccgccgccgacattgcccaaacccacgttcaagtcgccgatattggccgcacccaggttgaagtccccgacgttgccgaaaccgacgtttacgctgcccacatcggccaacccgagattgatgatgaggctctggttgagtgccgtccccgccgaggacaaccccgacagctgctcaccaacattgccgatgcccgagaccaccgccggggtccccggcggcaacccgccggtgttgtacagccccgacacacccgagccgaagttcagcacacccgatcccagcgaaccgaaattggcgaaacccgaac

SEQ ID NO: 1542 - DNA, 401 bp, Mycobacterium tuberculosis H37Rv
tttacgctgcccacatcggccaacccgagattgatgatgaggctctggttgagtgccgtccccgccgaggacaaccccgacagctgctcaccaacattgccgatgcccgagaccaccgccggggtccccggcggcaacccgccggtgttgtacagccccgacacacccgagccgaagttcagcacacccgatcccagcgaaccgaaattggcgaaacccgaacccgccccagccacctcggtctgcgcctggttccaccaacccgagctgcccgcaccgaaattcccgaagcccgacaccccaccgtcgccggagttgaagaaacccgacgacggagcggtggtcgtgttgccaaagcccggggtcgccgggatattaacgccgttgatcaggatagggcc

SEQ ID NO: 1543 - DNA, 401 bp, Mycobacterium tuberculosis H37Rv
ctgcccacatcggccaacccgagattgatgatgaggctctggttgagtgccgtccccgccgaggacaaccccgacagctgctcaccaacattgccgatgcccgagaccaccgccggggtccccggcggcaacccgccggtgttgtacagccccgacacacccgagccgaagttcagcacacccgatcccagcgaaccgaaattggcgaaacccgaacccgccccagccacctcggtctgcgcctggttccaccaacccgagctgcccgcaccgaaattcccgaagcccgacaccccaccgtcgccggagttgaagaaacccgacgacggagcggtggtcgtgttgccaaagcccggggtcgccgggatattaacgccgttgatcaggatagggccgacagt

SEQ ID NO: 1544 - DNA, 401 bp, Mycobacterium tuberculosis H37Rv
gttgccgaacccgaagttggcgttgccgatattgccgaaaccgaaattcccgctaccggcgttggcagcacccaaattctgcgcaccgacattggctgcgcccaggttgaatatcccgacattgcccaacccgacgttgtaattaccgacattgcccaagcccgcgttaagcctcaacatcttcgcgggtccggcaaatagagcattgaggaacgcgccgacaccaccccccaacgcctgcgccggtgggctgaacgccggcaacgccgcggcagcagccgacgcgccggaatggtagccggccatcgccgccacatcggcggcccacatcaactcgtactcggcctcgacggccgcgatcgctgcggcgttctgccccagcaggttcgacatcgccaacg

SEQ ID NO: 1545 - DNA, 401 bp, Mycobacterium tuberculosis H37Rv
ttcacacctcatcgtctcaccacgacgtggtgagcgcgggcacttcgacaaactaatctgcaatatcccgatcgcgtacaaacgtgccgacatttgcggcgcattaatgcccatatcggcttgtatctcttgtagtgccgctttgacggggtggtggtcaggtacggtggcctcgggagaggctggagggctcgacgttttcggctgagtgtctgggcccgtgaaagagatcgtctgctccagctttgtctcctgaactgacccggtttagggaattggtggccaggttgcggaagtgcgcagcatcgacgtgtacctgggtgaggcatcgaatcatcgacaagcaccggagccgcgcgtgaactcccgccgcgttgtggtcggggatgatgtgggagacc

SEQ ID NO: 1546 - DNA, 401 bp, Mycobacterium tuberculosis H37Rv
agcaccggggtgggcaacggctcggtcaatacccgtctcggcgtaggcaacaaacgcccgatgtgccgtcggccacgacacggcgtcagcctgggcgacctcggcccaccgagcgggccgcatccccgatcgccttggccatctgccgacgcagccgcagcgtgctgcggacgcgggcaggtacctgggtgatggcctcggtgaacggccccagcttgcagtagtcttctcggcatcgccagcgaattttgttccagcgcaccatgatgcggtcttcgccataaggtagatctttcggtgaggtaaccgcgtattccttcactgatatcgagaccacccccgcacgacgggcacgccgccgccgtcggctcatcggtgatcacatcgaccacccgggtccc

SEQ ID NO: 1547 - DNA, 401 bp, Mycobacterium tuberculosis H37Rv
gcaaaacccgagcccgcccccgccagcgcggtgtgcgcctggttccaccagcccgaggtgcccgcgccgaagttgccgaagcccgatcccccgcccgcgccggcgttgaagaagcccgacgacggggtgatggtgctgttcccaatgcccggggtgggcgggatgttgatcagcgggatgctgctggcgaggacatacaccgagccgtcggcgctcgccgcgatctcgggccaggtgatggccgggatgtccacgccgccggcgccggcggtcacgtccaggttcagcagcgaggtcgccgggaacgtcaaaccaccggggaagagggtgatcgcgttgacgctgccgggcacctggaagcccaacgtgatcgggccagtttcgagctgcggagtggtaaa

SEQ ID NO: 1548 - DNA, 401 bp, Mycobacterium tuberculosis H37Rv
tcgggatgttgaggggtccggcactggtgcgaatgtcgaagcccagcgggatcgcggaaatggtggtgcctgtgatcgtgaccgccgggatgtccacggacgcatcgatcggcaccacttccgacattgaaatcccatcgatgaccgaggccggaatatcaacaggtatgcggataggaatcgactcactcaacgaaatcgcatccagggggatgggctcgatctccaggggcacaccgatcccggccaccacgattggctcaagatgaattggtccgagttggcccgtgataggaccaagaacgggcaggcctaacgtgaaatccatgggcggaatatcgatattcgagagcgtgatggggccgaagctgatgaagctaccgttattcttcagggcggac

SEQ ID NO: 1549 - DNA, 401 bp, Mycobacterium tuberculosis H37Rv
cgggttgaagccaccggtgttggtgtcgccggcgttgaagctgcccgtgttgtagtcaccagtgttggcgatgccggtgctgaagctgccggcattgaagagcccggtgctggccgttccgctattaccgatcccggtgttgaagcggccggagttcccgatgccgaagttgccggtcccggaattgaagaacccgacgttgccggtgccggagttgaacaacccgatattgccgatgccggagttcaagcccccgatcccggtccgatggtccccgaccagcccgatcccgatgttgcccgtgccggtgttggcaaacccaatattgcccacacccatgttcgccaagccatagttgttgatgccggcattgccaaaaccaacattgcccacccccgccg

SEQ ID NO: 1550 - DNA, 401 bp, Mycobacterium tuberculosis H37Rv
gtggtgtcgataacgatagggccgataaagctgacaagctgaccgttagaatcaaaggtttggatttgtggaattgtgattttccctaaactgaaggtgggaaagggcaattggttgacaaatgtctgttgggcaaacagggtgatgggtgtgatggtcagcgggccgatgttgatgggtatgccgataccgccgccgaaggcggggatcacgatgtcgggaaccaccagcgggcccaagttgacggtttggtgaatgctgagcgggatggtgggcaggatcgggatgggctggatggtgatcgggccgatgtcgccgttgagcaccaggccgatgggaattgcggggatcgacgagccggcggagacgccgaacaggccctggtagtcacccacccacag

SEQ ID NO: 1551 - DNA, 401 bp, Mycobacterium tuberculosis H37Rv
ccgataccgccgccgaaggcggggatcacgatgtcgggaaccaccagcgggcccaagttgacggtttggtgaatgctgagcgggatggtgggcaggatcgggatgggctggatggtgatcgggccgatgtcgccgttgagcaccaggccgatgggaattgcggggatcgacgagccggcggagacgccgaacaggccctggtagtcacccacccacagcacgccgttgttgaagttgcccgagatgaacgcgccggtgttgacgttgcccgagttggcgatgccggtgttggtgttgccggtgttcagccagccggtgttcacaccgccggggttgaagccaccggtgttggtgtcgccggcgttgaaactgccggtgttgtaactgcccacgttcaccac

SEQ ID NO: 1552 - DNA, 401 bp, Mycobacterium tuberculosis H37Rv
ccgacgccgacgttgttggtgccggtgttgccgaaaccgatgttgcccacacccaggtttgcgaaaccatagttgctgctgcccgcattgcccaacccgatattgcccaagccggccaggcccgcccccagaccggagttgccgaacccgacattcccgttaccgaggttgccgaacccgacattggtgccaccggcattcccgaaacccagattctgcccacccacattgcccgcgcccaggttgaacaccccgacattgcccaacccgacgttgtaattgccgacattgcccaaacccgcattcaggctcagcgccttcgcagggctggcgaacagggcggtaaggaacgcgccgacacctccccccagcgcctgcgccggtgggctgaacgccggcaa

SEQ ID NO: 1553 - DNA, 401 bp, Mycobacterium tuberculosis H37Rv
cacggagttgatttccggtggcaacaccggaaactccatcacccattccccttcccagcccgacaccaatccccaccgacaccccccacatgacgtgtcgacgccccgataattttgctcgcattgccaacggcccaagaacgattccccgataatcgcgggtactgggtgcactttgcacagacgccgcagcaaaatgcacatatgccctgtccagaccggcgagcggcagggcgtcatctgccctgacacttcgactgctggcggagtccgcgagcatgctcaccgccgcggcgtgcgccgaaccggcagcgccggcaaatccatgaccccagcctgttcttgggtcactgcgacgttcacttttaagcgcgaccacgtaaggttgggcaaagttccca

SEQ ID NO: 1554 - DNA, 401 bp, Mycobacterium tuberculosis H37Rv
tgccggcgtcaactacggcgatccggtcgacgccaaagcgctgggtcagtccgtctgcccgatcctggccgagcccggcgggtcgtttaacaccgcggtagccagcgttgtggcgcgcgcccaaggcatgtcccaggacatggcgcaaaccttcaccagtatcgcgatttcgatgtactgcccctcggtgatggcagacgtcgccagcggcaacctgccggccctgccagacatgccggggctgcccgggtcctaggcgtgcgcggctcctagccggtccctaacggatcgatcgtggatgcgatgtagaccatggccgccgcgaccgtcacggtcgtcacgaaatcgatccccttgctgcgcaccaccaacaggccggcccgttcctcggacaacaccaa

SEQ ID NO: 1555 - DNA, 401 bp, Mycobacterium tuberculosis H37Rv
tggcgttcagttcgtcgatggtctcattcagcgtggcggtgctgatgtcggcgggcaggtcgcggcgaatcgacgtgatgcccaccttggcgcaatcagcgtgcttaccgcgcacgtaggcctgcgaccccgggtcgtcaccgaccaggatggtgcccaagccgggcgtgcggcccgccgcgtccaatgcggccacccgctgcttgaggtcaccgaagatctcgtcgcgggtagccttgccgtccagcatgatcgcgcccacgccagccagtctggcatgcgtgtccgcggtgccgatggcgacgacccgctcacgcgcccaccgtacggacaacttgtaccattgtggtacagattatccgtacatctttctaagagaggacgcatgagcatcagtgcga

SEQ ID NO: 1556 - DNA, 401 bp, Mycobacterium tuberculosis H37Rv
gtgcttaccgcgcacgtaggcctgcgaccccgggtcgtcaccgaccaggatggtgcccaagccgggcgtgcggcccgccgcgtccaatgcggccacccgctgcttgaggtcaccgaagatctcgtcgcgggtagccttgccgtccagcatgatcgcgcccacgccagccagtctggcatgcgtgtccgcggtgccgatggcgacgacccgctcacgcgcccaccgtacggacaacttgtaccattgtggtacagattatccgtacatctttctaagagaggacgcatgagcatcagtgcgagcgaggcgaggcagcgcctgtttccactcatcgaacaggtcaataccgatcaccagccggtgcggatcacctcccgggccggcgatgcggtgctgatgtc

SEQ ID NO: 1557 - DNA, 401 bp, Mycobacterium tuberculosis H37Rv
gtgagaagcgtcaacttcgatcccgatgcctgggaggacttcttgttctggctggccgctgatcgcaaaacggcccgtcggatcacccggttgatcggagaaattcagcgtgatccgttcagcgggatcggcaaacccgagccgctccaaggtgagttgtcgggatactggtcgcgccggatcgacgacgaacaccggctggtgtatcgagcgggcgacgacgaagtcacgatgctgaaggcccgataccactactgatttgggggctggtggtattccggcgggcttaagctccccatgtggctcccggcagctgcgaagccccggacgtgttcaacccggccaaactcggtccgctcacgctgcgtaaccgggtcatcaaggccgccaccttcgaggcc

SEQ ID NO: 1558 - DNA, 401 bp, Mycobacterium tuberculosis H37Rv
ctggtcgcgccggatcgacgacgaacaccggctggtgtatcgagcgggcgacgacgaagtcacgatgctgaaggcccgataccactactgatttgggggctggtggtattccggcgggcttaagctccccatgtggctcccggcagctgcgaagccccggacgtgttcaacccggccaaactcggtccgctcacgctgcgtaaccgggtcatcaaggccgccaccttcgaggcccgcacacctgacgcgttggtgaccgatgacctgatcgagtaccaccggctgccggccgcgggcggggtcgccatgaccaccgtcgcctattgcgcggtctcccccggcggacgcaccggcggcaaccagatctggatgcgcccgcatgcggtgccgggactgcgccg

SEQ ID NO: 1559 - DNA, 401 bp, Mycobacterium tuberculosis H37Rv
gccgccaccttcgaggcccgcacacctgacgcgttggtgaccgatgacctgatcgagtaccaccggctgccggccgcgggcggggtcgccatgaccaccgtcgcctattgcgcggtctcccccggcggacgcaccggcggcaaccagatctggatgcgcccgcatgcggtgccgggactgcgccggctcaccgaggcgatacacgccgagggggcggcgatcagcgcccagatcggccacgccggcccggtggccgacgcccgctccaaccaggcgaccgcgctggctccggtgcggttcttcaatccgatcgctatgcggttcgcccagaaggcgacccgcgaggacatcgacgatgtgctggccgcgcacgcccatgccgcccggctggccgtcgacgc

SEQ ID NO: 1560 - DNA, 401 bp, Mycobacterium tuberculosis H37Rv
acctggtcaatcggatcgcggccgaaggcagccaggtgcggtcggcgtgcacacactgtaatcagtgcatggccacgatttatcgccgcactcactgtgtggtcaccggggctccatagcgtccagattgacgccaccgtgaagaagtgcaacccattgtgccggaaatccggttgacttccccgcgcgaatccggctcaggcactattgaccgcgcgcagcataatttgaaccgatgagtcgaccccatccaccggtgctgacagttcggtccgatcggtcgcagcaatgcttcgccgcgggccgcgacgtggttgtcgggagtgatcttcgtgccgacatgcgcgtggcgcacccactgatcgcccgtgcgcacctgttgctgcgcttcgatcggggca

SEQ ID NO: 1561 - DNA, 401 bp, Mycobacterium tuberculosis H37Rv
aatctgcgcaccggccagcaccagcaggttggcgctgttgcggcgcagccgggcggccaggtgatcgagccggaaaaggctgtcgagtcgggcgggatcctcctcgttgcgctccagttggtcgatgaccgacagctgctggtcgaccagggaacggctacgccgcgacatggtctcaaacatctcgttgaccagcagtcgcaaccgcgtttcctcgccggccagcaacagggcccgggtgtgcagctcgtcgaccgcatgcgcgacctgaccgatttcctcggtggtgtacaccgccagtggctcggggatcggctcgtcgccggcgcggaccgccgcgatctcgccgtcgagatcggtatgagcaaccttgagcgccccatcacgcagtacccgcatcg

SEQ ID NO: 1562 - DNA, 401 bp, Mycobacterium tuberculosis H37Rv
gcggtacgggcacgaacgggcacgccggcggtgcgggcggcgccggcggtgccggtggtcgcggcgggtggctggtcggcaacggtggcaacggtggcaacggtgccgccggcggcaacggcgccatcggcggtaccggtggtgccggcggcgtccccgccaaccagggcggtaacagcgccctaggcacccagccggtcggcggcgacggcggcgacggcggcaacgggggcaccggaggcaccggcgggcgtggcggcgacggcggatccggcggcgcgggcggcgcgagcggttggttgatgggcaacggcggcaacggcggcaacggcggcaccggcggctcaggcggtgtcggcggcaatggcggcatcggcggtgacggcgccggcggcggaaac

SEQ ID NO: 1563 - DNA, 401 bp, Mycobacterium tuberculosis H37Rv
gggtggtgcagcttgaaccacgccgagtagaacaccagcgacgcgaaactcagtgcgtggctctcggggaagccgaaattggcaaacgcctccagcttttcgtagatccggtcgatcacctcgtcgggggcgccgtgcagcgcgcgcatgccgtcgtagaaccggccgcgcagccggcgcatgcgttcggtggagcgtttggaccccatggcgcggcgcagctggtcggcctcggcggcggaaaagccggcgcagtcgaccgccaactgcatcagctgctcctgaaacagcggcactcccagcgtctttcgcaatgccggcgccatcgacgggtgctcgtagatgaccgggtcgacgccgttgcgccgccggatgtaggggtgcaccgatccgccctggat

SEQ ID NO: 1564 - DNA, 401 bp, Mycobacterium tuberculosis H37Rv
gcagtcgaccgccaactgcatcagctgctcctgaaacagcggcactcccagcgtctttcgcaatgccggcgccatcgacgggtgctcgtagatgaccgggtcgacgccgttgcgccgccggatgtaggggtgcaccgatccgccctggatgggcccggggcggatcagcgccacctccaccaccaggtcgtagaacactcgcggcttaaggcgcggcagggtggccatctgcgcacgtgactccacctggaacacgccgacggaatcggcgcgggccagcatctcatacaccgccggctcggagaggtcgaggcgggccaggtccacctcgatgcccttgtgctcggccaccaggtctttcgcatagtgcagcgccgagagcatgcccagcccgagtaggt

SEQ ID NO: 1565 - DNA, 401 bp, Mycobacterium tuberculosis H37Rv
ccatgctgccctatctccccgtcgagtacgacgacccggtgcggcgattgcgcaccgtgcacaaccggtcacagcagagcggccgtcgtcaacccgacagtctgtcggactatacgcctctcatgttgtgcgccaagatgattcacgcgctagctcggttaccgcaacaaggcatcgtcaccctggcgaccagtgcacccaggccacgccaccagttacggctgatgggccagaagatggaccaggtgctgcccatcccgcccaccgcactgcagctgagcaccgggatcgcggtcctcagctacggcgatgagctggtgttcggcatcaccgctgactatgacgccgcgtccgaaatgcagcagctggtcaacggtatcgaactgggtgtggcgcgtctg

SEQ ID NO: 1566 - DNA, 401 bp, Mycobacterium tuberculosis H37Rv
gtcaacccgacagtctgtcggactatacgcctctcatgttgtgcgccaagatgattcacgcgctagctcggttaccgcaacaaggcatcgtcaccctggcgaccagtgcacccaggccacgccaccagttacggctgatgggccagaagatggaccaggtgctgcccatcccgcccaccgcactgcagctgagcaccgggatcgcggtcctcagctacggcgatgagctggtgttcggcatcaccgctgactatgacgccgcgtccgaaatgcagcagctggtcaacggtatcgaactgggtgtggcgcgtctggtggcgctcagcgacgattccgtgctgctgtttaccaaggatcggcgtaagcgttcatcccgcgcactccccagcgccgcgcggcgg

SEQ ID NO: 1567 - DNA, 401 bp, Mycobacterium tuberculosis H37Rv
gtggcggctgtgagctggcgacggcctgcgatgtgtgcatcgcgaccgacgacgcgcgcttcggcatcccgctgggcaagctcggcgtcacgacgggcttcaccgaggcggacaccgtcgcgcgcctcatcggtccggcggcgctgaagtatctgttgttcagcggagaactgatcggcattgaggaagccgcccgctggtgattggtgcaaaaggtcgtcgcaccacaggatttggcggccgcgacggccaaactggtcggccaggtctgtcggcaatccgcggtgaccatgcgtgcggcgaaggtggtcgccaacatgcacggccgagcgctgaccggcgccgacaccgatgcgctgatccggttcggtgtcgaagcctacgagggggcggacctacgc

SEQ ID NO: 1568 - DNA, 401 bp, Mycobacterium tuberculosis H37Rv
tcgtacaagatcctccggagcgttgtttcggtcatatagtatgagggagcaacggtgaagtatagactcgtttttcctgagctgagcagcggaaaatcgaaagtgctgaaacgcccaaatccgatgaacatgtcagccttgtcaacatactcgccgtaataaccttcgataatctctctccgcgtgggaggtttaccatgcgtttcgttccacgagatagaaaactgcgcaacagactcagccgcatcgttgccaaaaacaccgaagcatagtctgtgttcagtgttggatgacgtagagattgttaggtcatcgaatgacttgacaacggctgccccttgcgcggtcgaaggcaatcttttcttataatcaccataaaaaagaacgtggacctcgtgttc

SEQ ID NO: 1569 - DNA, 401 bp, Mycobacterium tuberculosis H37Rv
cggcgatgcccgaatcgaacacccgatgcgggtatcgcctcgacagcgcgcctagaccagtgggcagacgcatcgccgcggtcagcccgacgacgtcggatcggtcgtcagcaatgcgcgcgatttcgtcctcgaacacgtcggtccagctccgctgactgggtgtgctagcgaggccggtggcaatgtcgaccaccccgcaggcgtgcatatggtccctctcgtcagcttcggctggaggataaccccggcccttactagtcactgcgtgaacaacaacgggcctagctgccgcggccgcttttcgtagaaccgcgcacgtgtcggggatgttgtgcccatcgaccggaccgatgtaggtaaatcccatgttctcaaagaggttcggccctcggggtgtg

SEQ ID NO: 1570 - DNA, 401 bp, Mycobacterium tuberculosis H37Rv
ccagcagctgctcgtatggaccgccctgcggcagcggcgagagcagggcgacgggccggccgcggtcggtgatctcgatcgtctcgccggcctcgactcggcgcagcagctcgctggcccgctgccgcagcgcacgcacccccaccgaggtcattgtgctaactgtagcacaagcggtcggcgtcatgggccgacgttcgactcgcgcaggctttaagtaacgtcggtgttaattactaggacctgaaaaagtcggcgcgttgttcctcggttggttggcgctgagctgggaggatggcctcaatgcccttgttgcggaagggattgaggccatcgtgtttcgtactgtaggcgatcaggcatcgttgtgggaatccgtgctgcccgaggagttgcggcgg

SEQ ID NO: 1571 - DNA, 401 bp, Mycobacterium tuberculosis H37Rv
cacggccgggtttaccggcagcggcggcatcggcggcaacggcggggccggcggcaccggcggtaacgccggtgtcgccttgtcggttggcagcacgggcggactgggcggtaacggcggcagcgggggcctcggcggcggcggcgggtcgctcttcggcaatggcggggccggcggtgtcggcgcaaccggcggaaacggcggaagcggtatcgggcccgccagcgtgggtggcaacggcggcaagggcggcgttggtgcggccggcgggcttgccgggcagatcggcaacggcggtagtggtgggtccggcggtgccgggggcaacggcgggaccggcgataccgccggcaacggtggcaatggtggtgccggcgcggtcggcggcaacgcccagctca

SEQ ID NO: 1572 - DNA, 401 bp, Mycobacterium tuberculosis H37Rv
gcgcggcgatcgaggtgatgttggccgccacaccgccgccaagctcggccaccagcgcccggcccgccaccccgtaggtgcacaacccgtgcaggatcggcttgggaaacccggccagctgcgtggcgaaccaggggtcgctgtgcagcgggttgcggtcaccggagagccggtagatcagcgcctggtcctcacgggtcggcatatcgattcgggcgtcggggtggcggtccggaaattccggcgcggccggccgctcaccccgcgctcctccgaaacccccctgaccccgaagcaccaacgtggtaagcgtttcggcaaccaacgaacccgattccgggtcgcaaccgcggccgcgcagcacaacgatggcgttcttgccctcccccttgtcctggatg

SEQ ID NO: 1573 - DNA, 401 bp, Mycobacterium tuberculosis H37Rv
cgtggatctctttcggatgcaacccggtgatggtgtgcagcagcatgaccccgtcagcgggcagcaggcgatgcgccaggctgaagaacgcgtcgtagcgctcgtgaccgaaatgttcgaaagcaccgatgctgacgatgcggtcgacgggctcgtcaaactgttcccagccggccagcagaacgcgtttggagcgtagattttcggagttggcgaccagctgctgaacgtggttggcctggtttttgctcagggtcagaccgacgacgttgacgtcgtatttttccaccgcgcgcatcatggtggcgccccagccgcagccgacgtccaacagtgtcatgcccggctgcaatccgagtttgcccagcgcgagatcgatcttggcgatctgcgcctcttgc

SEQ ID NO: 1574 - DNA, 401 bp, Mycobacterium tuberculosis H37Rv
ggccgcaagccgcgtcgacacgccttgccagtcgccgtcggtgaccagcagggtgcagcctttttgacgggcacgggccaccactgcccgcgcccgcgcccgcgtcacccggcgccctcccagaccgagcaccaccagatccatgccgtcgatcagcacagcggccacctcaaccggatcggtcccgggatctggtatcaccgcgagccggctcagatccgcccccatctccaccgcggccagcaacccgatatccggctggccaacgatggccgcgtttcccccggccgccgtcaccgatgccaccatgctcagcagcagtgaccgcgcacccgacagcactcccaccgtccccgggggcaacgacaccggtcccgccggcaccaggtcgcccgaacggc

SEQ ID NO: 1575 - DNA, 401 bp, Mycobacterium tuberculosis H37Rv
ccaccatgctcagcagcagtgaccgcgcacccgacagcactcccaccgtccccgggggcaacgacaccggtcccgccggcaccaggtcgcccgaacggctgggccccccggacaccttctcggacagcaaagccatctgccgtcgtagtgattcgagctgctcagcaccattttcaaggcgttggtcggaggcgaaggccgcagtcatgaccagcctcctgttcgaaaatatgttcgaagtcagtaaacacccgtccttggagtccgtcaaggtcatgagaggctgccttgtgcaatcgcgtaaaaccacctcggtactggcggctgccctgctgttttgcggcctgttaggcccagggacggccccaccggccaccggtggcgggcctgcctgccggccg

SEQ ID NO: 1576 - DNA, 401 bp, Mycobacterium tuberculosis H37Rv
ccgtcggcgtagacactggccggtccaccggaaagcacgagcgccaccggctgacgggccctgatctcctcgatcgaggcggtgtgcggaatcacctcggagaaaacccgtgcttctcgaacccgacgggcaatcaactgggcatattgggcaccgaagtcgaccaccaacaccggtcgagccggtgtctcaggcacgtcgatgtcagcaggctgcaccacggccagtcagtctagtggctggggtgactcccgaggtcggccggtagcggtccatgggccggtccgcaggttaccgaagaggccagtgctgccgccgccacttgggccttcttcagtcccgacagagagattcgccgatcgtagacgaccgccggcgatgctctgatcaaggcgagctga

SEQ ID NO: 1577 - DNA, 401 bp, Mycobacterium tuberculosis H37Rv
ggccgacctggtgctggcgatgcagtggcagagtcacgcgttcacgcccgagcagaaggcgcgcaacgtcgactactacgaacggcgcatggtgcgcgactcgtcgttgtcggcctgcactcaggcggtgatgtgcgccgaggtcggccatctcgagttggcccacgactatgcctacgaagccgccctgatcgacctgcgcgacctgcaccgcaacacccgtgacggcctacacatggcttcgctggccggagcctggacggcgctggtcgtaggcttcggcggcctacgcgacgacgagggcatcctgtccatcgatccgcagctgcccgacggcatctcgcggctgcggttccggctgcgatggcgcggcttccggctgatcgtcgacgccaaccaca

SEQ ID NO: 1578 - DNA, 401 bp, Mycobacterium tuberculosis H37Rv
caccggtgaacgtctcattcaccgcgcacctccgcttcctgcacggcggcgacgacccgggcaacgtcatccggggccatgtggtcgtggactggcagcgacacgattcgcgagcaaatgtccgccgtgacggctagatcggtcgactcgactaactcggcattcgtcacaaagtacggatgtcggtgctgcggtgggttgtagtagtcgcgcgcctcgatcgcgtgcctacgcaggctacccagaaccgcggccttgtggtcggcggacgtgcagcaagcgctcgcgaaacagagcgacgcaacattggcgttgtcctggaaacgcacacccgcgtcggccataccggtgcgatagcactcgaggaccttgcggcgacttgccaggcggcgatcaagccc

SEQ ID NO: 1579 - DNA, 401 bp, Mycobacterium tuberculosis H37Rv
gatctcgcatgcaccgcgtccaccgaggcgctcgccgtcggcgtacgtggagccgaagccggccgccgagtcgagcacaatcggtagctcccattcggcggcgagctcctcccagacgctgatctggggattgccgacgccgaacacattggccagcaggatgccggcgatccggtcgcggaagcgttcgatgacggcgcgggcggagtggacgcatggctgccatgtgttggcgtcgatgtcgatgaaccagggacggtacccagtccatagcgcagcctgagccacgccgacgaacgtgaacgacggcatcagcaggtagcggtcccgcgtaccggcgccgaaactgacgtggagcgccgcgaggagtgccagggtgccgttggcgagggtagcaacgt

SEQ ID NO: 1580 - DNA, 401 bp, Mycobacterium tuberculosis H37Rv
atgggcgtggacgttgtcggtcaggatcaatatcgtcacgactcgcccccgccagcctgcccagcgcccatcagcggagcccccaacaccagctcaccctacttcagggccgacgcataccggacggccacgctggggccagcgcagggacatcagtcagtgcggttccaggatccgggctaccgcatcgttcacggacagccgtagttcgtcaccggtcagctcgtcgatacccgtcgccgagcgcagcatgggcgcaaagagccgccaaccgaattgcagcgcaagggcgtgcgcgaccgccagccgcgcgcccaagtcgctgtcgtagcgaggccgtaccgcgtcgagcagctccgcaacattgggaaatcgctgttgcagctggcccacgggatatc

SEQ ID NO: 1581 - DNA, 401 bp, Mycobacterium tuberculosis H37Rv
gtgcagatcgaccccggccccacgccgactttcaccgcgtcggctccggcgtcgaccagggccgcggccgcggacctggtggcgacgttgccgcctaccacctcaacccggtcgccgacttcggacttgagtttgcccaccatgtcgagcaccaaccggttgtgcgcgtgcgcggtgtccacgaccagcacgtcgaccccagcgtcgaccaacatcatggcgcgcacccaggcatcgccgccgacgccgacggccgcccccaccagcagccggccgtcgctgtccttggtggccagcgggtgttgctcggtcttgacgaagtccttgacggtgatcagcccggtcagccggccgcggccgtcgaccacgggcagcttctcgatcttgttgcggcgcaacag

SEQ ID NO: 1582 - DNA, 401 bp, Mycobacterium tuberculosis H37Rv
cggcgcggccgtagtgcacgtcggcgggcgtgtgcagtccgatgccggaatgcttgtgttcgtggttgtaccagccgaagaaccggtcgcagtgcacccgggccgcctcgatcgactcgaaccgtttcgggaagtcgggccggtacttgagggtcttgaactgggcctcagacaacgggttgtcgttgctggtgtgcgggcgtgagtgcgacttggtgacaccgaggtcggccagcagcagtgccaccggtttggagctcatcgacgagccgcggtcggcgtgcagggtcagctggtcggcgctgatgtgctgggcggcaagggtttgcgcgatcagccgctcggccaagaccttcgactcacgcgaggccaccatccacccgaccacgtagcgggagaag

SEQ ID NO: 1583 - DNA, 401 bp, Mycobacterium tuberculosis H37Rv
gtgaacatccgaccggtgtaggccggagcgatcgaatgcgcgggcacggacgggtgactgcgagacacggcggatcctttccgggcttgttgcggactggcaggactacagggcagccagagcggcccgaatgtggccgctgatgcgcgacgccgacgtgggcgcatcgccggggccgggatcggcggccgcggccgccgatgcccgggcgtgcacgaacgccgcggccgcggccgcctccccagacggcaatcccgacgccagcagcgcaccgatcatcccggacagcacgtcaccggacccggcggtggccgcccaggactggccggccggattgagatagaccgggccgccgggatcggcgatgacggtgacattgcccttgagcagcacggtggcgc

SEQ ID NO: 1584 - DNA, 401 bp, Mycobacterium tuberculosis H37Rv
tgaacatccgaccggtgtaggccggagcgatcgaatgcgcgggcacggacgggtgactgcgagacacggcggatcctttccgggcttgttgcggactggcaggactacagggcagccagagcggcccgaatgtggccgctgatgcgcgacgccgacgtgggcgcatcgccggggccgggatcggcggccgcggccgccgatgcccgggcgtgcacgaacgccgcggccgcggccgcctccccagacggcaatcccgacgccagcagcgcaccgatcatcccggacagcacgtcaccggacccggcggtggccgcccaggactggccggccggattgagatagaccgggccgccgggatcggcgatgacggtgacattgcccttgagcagcacggtggcgcc

SEQ ID NO: 1585 - DNA, 401 bp, Mycobacterium tuberculosis H37Rv
aggctggccaacaggggcgcctcagccgcgcggatggtgtcgacagagtagtagtggcgcatctcaggcccgccgtcctcgggtgccgcgcctgtgcagcagacttttgattctggccggattccacagccgaccgtcgcgttcccgggccatcggatagaacagcagaccaatcaggatggacgcgaagtgaccgaccgcggtgaagtccagctcggctttgtccatcgcgatcagcggaaaaccaaagatgaccagcagcaccccgagatagccccagcgccacggtttggcgatgtgataggtcaataccgccatcacaccgaccaggaagtagctgaccccgatatcacgagcgtgcaccatcctttcggaggcgtctcggtgctggatcgccagat

SEQ ID NO: 1586 - DNA, 401 bp, Mycobacterium tuberculosis H37Rv
gccaccgcgcacgaaaggccaacacttgtccaacccatatgcccagcaccagctgaagctcatcaggcacacgggtgcgctgatcctgtggcagcaacgcacctacgtggtctccgggacgcgcgagcaatgcgaagcggcgtacaagtcggcgcagacctacaacctgctcgttggttggtggagtttggtgtcgctcctcgcgatgaactggatcgcgctgatttccaacttcaatgcgattcggcgggtgcgagccgccgccgacggggcgtccgttccccacggcccgcacgccatcgcccatccagccgttccccggggacccataccggcgggctggtatccagacccgtccggggcgggactgcgttactgggacggtgcgacgtggacccact

SEQ ID NO: 1587 - DNA, 401 bp, Mycobacterium tuberculosis H37Rv
cccaggcccacaccgccggacgcagcgttcggtccgggcgctgctgaccgggtacctgttgtacacgctcggcggcgacaagacttatcgcaggttcgccgatccagacctgcagctgcccaagacggacccgatcgaccctgaagcgccgccgatcaccccgggggagaagatcgtgacgctgttgaagtagcgcgggacaccccgacccgtcacggccccgcctgcggaagctcgtcggcggcgatctcacagggggtggctccctcggacagcgcttccggcgaaggcccattcgccggttccggcgcacccggcggcgccggcgcagcgaccggaggcggtggttcggcgaccggaggcgcggcaggcggcggcggttcggcgaccggcggcagcgt

SEQ ID NO: 1588 - DNA, 401 bp, Mycobacterium tuberculosis H37Rv
ctcgtcaccggcaccggtgaccaggatgccccggcccggtggcagcggcatcgggcggctcgacccgaacagtgcgccttcatccggacgtccgctcatcagcagtgcccggcagcccaggtcacgcaggctggcaagcaccggctcgaacagcgcccgagcagcacccccgctgcgccgcgccaccaccaggtgtaaaccgagatctcttgcgtgcggcaaatattcgagcaagaccatcagcgggttgcccgatgagaccgcaaccaggtcgtagtcgtcgaccacgacatagatatccggacccgaccaccaggacctggctcgcagctgcgcctggctcacatccggggcgggcatccgcgcctggagcaggtcgaccagactcgacagcttggcac

SEQ ID NO: 1589 - DNA, 401 bp, Mycobacterium tuberculosis H37Rv
ggcggtgcccggggtccccggtgtccatagcgtgctagttgccgcgatggcggcggccgccacgtcggtgctggcaatgcgcataacgggttgtgggggtatcacgttgaccgcggtggcgtgctgcgcggtagtcgtcgcggccgctacgctggtcggcgcgatcactgcggccccggtgcctgccatcggttcgctggccacgctggcatcctttggtctgttagaggtatccgcgcggatggcagtcctgttggcggggttgtcgccacgattgccgcccgcgctgaaccccgacgacgccgatgccctgcccaccacggatcggctgaccacccgagcgaaccgtgcagatgcttggttgacgagcctgctggcggccttcgcggcctcggcgacca

SEQ ID NO: 1590 - DNA, 401 bp, Mycobacterium tuberculosis H37Rv
caacgggtcgcggtcatcgacaccggcgttgcgcgccatcgacggttgcccaaggtggttgccggcggtgactatgtcttcaccggggacggcaccgcggattgcgatgcacacggcacgctggtggccggaattatcgcggccgcaccggatgcgcaaagcgacaatttcagcggggtggcacccgatgtcaccttgatcagcattcgccagtccagcagcaagttcgcaccggtcggcgacccgtccagcacaggtgttggtgacgtcgacaccatggcgaaggccgtgcggacggccgccgacctcggcgcgtcggtgatcaacatctcgtcgattgcctgcgttccggccgcggctgcgccggacgaccgcgcgctaggtgccgctttggcctatgc

SEQ ID NO: 1591 - DNA, 401 bp, Mycobacterium tuberculosis H37Rv
tcgcgctgatggcaaccctggccaccgccagccgccggctacggcccgggcgcaacggtatcgcgggcgactgacgcgttggctctactcagctccggtccggacggcagtgtcgccaacaccggccacggcgccgggatggcagccgtcggcagaccgaggtcgtgtgccacgtcgtcgtcgtggatcgcgaaccgcactccggtgtcggtgaccaggtagcgcgtgccggtgccgccgccggacaggctgcgcgcggctacgtaggcgctgcgtcccggcggcaggtacaccgcgtccagtgcggggccgcgaccgtcggcttgtgccagtgtcaccggaacccctccgaggggcaccggcgggccgctgcccgccaagaacgcgacgcgagcagcacc

SEQ ID NO: 1592 - DNA, 401 bp, Mycobacterium tuberculosis H37Rv
cgtggacgctgctggccggtcccggctgggttgcatttggggcgaccaaacagatcatcggcctgttcctggcggtctatctgatggccaacatccccggctcgtcgacaatcgccaaccagccggtgcaccaattcatgcagatataccgcaccttcgtaccgggctggctggcgttgacactcgccgtcatcctggtggtcttgagccagatcaagatcaacgtcacgaacgcgtattcgggctcgctggcgtggaccaattcattcacacggctcaccaagcactatcccgggcgggtcgtgtttcttggggttaacctcgcgattgcgttgattctcatggaagccaacatgtttgacttcctgaacacaatcctgggttgctacgccaattgcggt

SEQ ID NO: 1593 - DNA, 401 bp, Mycobacterium tuberculosis H37Rv
ttggcctccgaggtcaccgtcttctcccggaccagttcgatcacggccatcggagcgttgtcgcccttacgtgcctcgattttgatgatacgggtgtagccaccatcgcggtcggcgaagaacggtccgatctcggcgaacaaggtatgcaccacatccttgtcacggagcttcttgagcacctcgcgccggttgtgcaacgcgccttttttggcatgcgtgatcagcttctccgcgtacggacgcagcgcccgggccttcggctcggtcgtcgtgatccgcccatgctcgaacagggacgtggcgaggttggccaagatcgccttctgatgtgaagacgacccgccgaggcgagggcccttggtaggcttgggcatagctgacgctcctgtctggattag

SEQ ID NO: 1594 - DNA, 401 bp, Mycobacterium tuberculosis H37Rv
tgtgaaacgggccttctgcttctcctgcagctgaagcagatattcgctttccttgatccgcgcgcgaccgtgttggccgggcgggtagggacgcttctcgaaggcctggtcgccaccgacgaggtcggtgcgcaaccgccgtgatttgcgggtgacgggtccggtgtaacgagccatcttctctcctagacgcgccggcgcttggggggccggacaccgttatgcggctggggggtgacatccgagatcgcgcccacctccaggccggcggcctgcagcgaccggatcgcggtctcgcggcccgagcccgggcccttgacgaacacgtcgaccttgcgcaccccgtggtcttgggccttgcgagcggcgttctccgcggccagctgggccgcaaacggggt

SEQ ID NO: 1595 - DNA, 401 bp, Mycobacterium tuberculosis H37Rv
gcgcggcgattgttgtcggtggcccctcgtagaatttggggtatgggttcgggtagccgcgaacggattgtcgaggtctttgatgcgctggatgccgagctggaccgcttggacgaggtgtcttttgaggtgttgaccaccccagaacggctgcggtctctggaacgtctggaatgcttggtgcgccggctaccggcggtgggtcacgcgttgatcaaccaacttgacgcccaagccagcgaggaagaactgggcggcacgctgtgctgcgcgctggccaaccggttacgcatcaccaagcccgacgccgcccggcgcatcgccgacgccgccgatctcggacctcgtcgagcactcaccggtgaaccgctagccccacagttgaccgccaccgccaccgc

SEQ ID NO: 1596 - DNA, 401 bp, Mycobacterium tuberculosis H37Rv
cggcgattgttgtcggtggcccctcgtagaatttggggtatgggttcgggtagccgcgaacggattgtcgaggtctttgatgcgctggatgccgagctggaccgcttggacgaggtgtcttttgaggtgttgaccaccccagaacggctgcggtctctggaacgtctggaatgcttggtgcgccggctaccggcggtgggtcacgcgttgatcaaccaacttgacgcccaagccagcgaggaagaactgggcggcacgctgtgctgcgcgctggccaaccggttacgcatcaccaagcccgacgccgcccggcgcatcgccgacgccgccgatctcggacctcgtcgagcactcaccggtgaaccgctagccccacagttgaccgccaccgccaccgccca

SEQ ID NO: 1597 - DNA, 401 bp, Mycobacterium tuberculosis H37Rv
gattgttgtcggtggcccctcgtagaatttggggtatgggttcgggtagccgcgaacggattgtcgaggtctttgatgcgctggatgccgagctggaccgcttggacgaggtgtcttttgaggtgttgaccaccccagaacggctgcggtctctggaacgtctggaatgcttggtgcgccggctaccggcggtgggtcacgcgttgatcaaccaacttgacgcccaagccagcgaggaagaactgggcggcacgctgtgctgcgcgctggccaaccggttacgcatcaccaagcccgacgccgcccggcgcatcgccgacgccgccgatctcggacctcgtcgagcactcaccggtgaaccgctagccccacagttgaccgccaccgccaccgcccaacgc

SEQ ID NO: 1598 - DNA, 401 bp, Mycobacterium tuberculosis H37Rv
cctcgtagaatttggggtatgggttcgggtagccgcgaacggattgtcgaggtctttgatgcgctggatgccgagctggaccgcttggacgaggtgtcttttgaggtgttgaccaccccagaacggctgcggtctctggaacgtctggaatgcttggtgcgccggctaccggcggtgggtcacgcgttgatcaaccaacttgacgcccaagccagcgaggaagaactgggcggcacgctgtgctgcgcgctggccaaccggttacgcatcaccaagcccgacgccgcccggcgcatcgccgacgccgccgatctcggacctcgtcgagcactcaccggtgaaccgctagccccacagttgaccgccaccgccaccgcccaacgccagggcctgatcggcga

SEQ ID NO: 1599 - DNA, 401 bp, Mycobacterium tuberculosis H37Rv
gtagaatttggggtatgggttcgggtagccgcgaacggattgtcgaggtctttgatgcgctggatgccgagctggaccgcttggacgaggtgtcttttgaggtgttgaccaccccagaacggctgcggtctctggaacgtctggaatgcttggtgcgccggctaccggcggtgggtcacgcgttgatcaaccaacttgacgcccaagccagcgaggaagaactgggcggcacgctgtgctgcgcgctggccaaccggttacgcatcaccaagcccgacgccgcccggcgcatcgccgacgccgccgatctcggacctcgtcgagcactcaccggtgaaccgctagccccacagttgaccgccaccgccaccgcccaacgccagggcctgatcggcgaggcg

SEQ ID NO: 1600 - DNA, 401 bp, Mycobacterium tuberculosis H37Rv
gaacgtctggaatgcttggtgcgccggctaccggcggtgggtcacgcgttgatcaaccaacttgacgcccaagccagcgaggaagaactgggcggcacgctgtgctgcgcgctggccaaccggttacgcatcaccaagcccgacgccgcccggcgcatcgccgacgccgccgatctcggacctcgtcgagcactcaccggtgaaccgctagccccacagttgaccgccaccgccaccgcccaacgccagggcctgatcggcgaggcgcacgtcaaagtgattcgcgccctttttcgcccacctgcccgccgcggtggatgtgtccacccgccaggccgccgaagccgacctggccggcaaagccgctcaatatcgtcccgacgagctggcccgctacgccc

SEQ ID NO: 1601 - DNA, 401 bp, Mycobacterium tuberculosis H37Rv
aagccagcgaggaagaactgggcggcacgctgtgctgcgcgctggccaaccggttacgcatcaccaagcccgacgccgcccggcgcatcgccgacgccgccgatctcggacctcgtcgagcactcaccggtgaaccgctagccccacagttgaccgccaccgccaccgcccaacgccagggcctgatcggcgaggcgcacgtcaaagtgattcgcgccctttttcgcccacctgcccgccgcggtggatgtgtccacccgccaggccgccgaagccgacctggccggcaaagccgctcaatatcgtcccgacgagctggcccgctacgcccagcgggtcatggactggctacaccccgacggcgacctcaccgacaccgaacgcgcccgcaaacgcggcat

SEQ ID NO: 1602 - DNA, 401 bp, Mycobacterium tuberculosis H37Rv
acctgaccccccaagcgcgggccacctttgaagccgtgctagccaaactggccgcccccggcgcgaccaaccccgacgaccacaccccggtcatcgacaccacccccgatgcggccgccatcgaccgcgacacccgcagccaagcccaacgcaaccacgacgggctgctggccgggctgcgcgcgctgatcgcctccgggaaactgggccaacacaacggtcttcccgtctcgatcgtggtcaccaccaccctgaccgacctgcaaaccggcgccggcaagggcttcaccggcggcggcaccctgctacccatggccgatgtgatccgcatgaccagccacgcccaccactactcccccgcaagcgggaggtacccccaggcgatcttcgaccacggcaca

SEQ ID NO: 1603 - DNA, 401 bp, Mycobacterium tuberculosis H37Rv
gtgctagccaaactggccgcccccggcgcgaccaaccccgacgaccacaccccggtcatcgacaccacccccgatgcggccgccatcgaccgcgacacccgcagccaagcccaacgcaaccacgacgggctgctggccgggctgcgcgcgctgatcgcctccgggaaactgggccaacacaacggtcttcccgtctcgatcgtggtcaccaccaccctgaccgacctgcaaaccggcgccggcaagggcttcaccggcggcggcaccctgctacccatggccgatgtgatccgcatgaccagccacgcccaccactactcccccgcaagcgggaggtacccccaggcgatcttcgaccacggcacacccctggcgctgtatcacaccaaacgcctagcctc

SEQ ID NO: 1604 - DNA, 401 bp, Mycobacterium tuberculosis H37Rv
cagccacgcccaccactactcccccgcaagcgggaggtacccccaggcgatcttcgaccacggcacacccctggcgctgtatcacaccaaacgcctagcctccccggcccagcggatcatgctgttcgccaacgaccgcggctgcaccaaacccggctgtgacgcaccggcctaccacagccaagcccaccacgtcaccgcctggaccagcaccggacgcaccgacatcaccgagctgaccctggcctgcggccccgacaaccgactcgccgaaaaaggctggaccacccacaacaacacccacggccacaccgaatggctaccaccaccccacctcgaccacggccaaccccgcaccaacaccttccaccaccccgaacgattcctccacaaccaagacg

SEQ ID NO: 1605 - DNA, 401 bp, Mycobacterium tuberculosis H37Rv
cttcgaccacggcacacccctggcgctgtatcacaccaaacgcctagcctccccggcccagcggatcatgctgttcgccaacgaccgcggctgcaccaaacccggctgtgacgcaccggcctaccacagccaagcccaccacgtcaccgcctggaccagcaccggacgcaccgacatcaccgagctgaccctggcctgcggccccgacaaccgactcgccgaaaaaggctggaccacccacaacaacacccacggccacaccgaatggctaccaccaccccacctcgaccacggccaaccccgcaccaacaccttccaccaccccgaacgattcctccacaaccaagacgacgacgacaaacccgattgacccccagcagtcaaagccacacgccacaacg

SEQ ID NO: 1606 - DNA, 401 bp, Mycobacterium tuberculosis H37Rv
acgcctagcctccccggcccagcggatcatgctgttcgccaacgaccgcggctgcaccaaacccggctgtgacgcaccggcctaccacagccaagcccaccacgtcaccgcctggaccagcaccggacgcaccgacatcaccgagctgaccctggcctgcggccccgacaaccgactcgccgaaaaaggctggaccacccacaacaacacccacggccacaccgaatggctaccaccaccccacctcgaccacggccaaccccgcaccaacaccttccaccaccccgaacgattcctccacaaccaagacgacgacgacaaacccgattgacccccagcagtcaaagccacacgccacaacgccgcacaaccataaacaccgagtccgtcagggcctggcc

SEQ ID NO: 1607 - DNA, 401 bp, Mycobacterium tuberculosis H37Rv
cagcagtcaaagccacacgccacaacgccgcacaaccataaacaccgagtccgtcagggcctggccggagcaaacacgccacggtggtaggagctgtgggcatatgccttggagcccaccagttgtgacaacggcgtgtgcaccgactgcccgcgtgcgagtctggcggcgaccgcgtttaggtcgaaccgcggacgccagttcaagtcacggcgagcgcgggagttaacgtacacgcggtcgaggcggtcggggaagcgccaaccacgctgggtccacacagccgcggccagcggtacccgccgggcgaacaccgatgccgcgtcggtgcgcagctgcgtcaggtcatcacgggtaaacggtgtggtcgccgacaccagatagcgcccgaaccccagctg

SEQ ID NO: 1608 - DNA, 401 bp, Mycobacterium tuberculosis H37Rv
gatccatccgcccgctgaccgggccggcgctggcactcatttgtccgtcgttgaggacagcccaggtcaccctgatcccgtgcgcaaccgcagtggaaatctccgtgccatgcatcaagaaagccccgtccccggcgatgcatatgacgtgttcttccggtcgagccagggccacgccaatggctccggcgatgccgcatcccatgggcgaaaagtcaacggtggcaaagaatctgccgggccgccgcaccggtatcccacgaaacgtccaagaaatgcaggtacccacgtcggcgcatatcgtggcgttgggtgcaagctcgcggtccagttcgtgcatcagctcaagcgggtgaatcgattccccccgcgcttgcggggtccccggcaacgccgctggc

SEQ ID NO: 1609 - DNA, 401 bp, Mycobacterium tuberculosis H37Rv
gatctgaaagccggcatcgcgggacagacgcaccagcaacgaatcgagccgggaagtcggtagcccgcatacgaccgaaatgccggctgcgcgcatcctggcgacgagatgatccccgacggtcacgggagtcacggccatgccccgatcacggcggcctcgcccatgcgctgatcgcgttccggtaggtaggccgggccgcaggcgcacaagaatgtcaacggaactgaacctagggcccggattttctgcgggacaccagccggtatccagaccgcatcgccgggcccgacctcgccagattcgtctccgaccgaaaccagcccgcgccccgagagaacaaaatagatctcatcggtggcttgcaatcggtgccatacggtctcggctcccgccgccac

SEQ ID NO: 1610 - DNA, 401 bp, Mycobacterium tuberculosis H37Rv
agaacaccacgatcgcggcgccaccgcctacggcgaagccgatgcgccagccgaattcgtgaacctgctcgcgggtgaagaccgccaggatgactagcagggtgaactgggcaagcacgtgcccacccaccagcgtcacatactgaaacgacgagaagtagccgcgccgctcccgcgtcgcggcctcagacatgtacgtcgccgacgtgccgtactctccgccggtcgcaaatccctggacgagccgacacaaaataagcaggatcggcgcagcgacgccaatgctcgagcgagacggcaccaacgccacgatcagcgaacaggcggccatcagcgacacactgaacgtcagcgcggcccggcggccgcggcggtcggcaaaccgaccaaggaaccacgat

SEQ ID NO: 1611 - DNA, 401 bp, Mycobacterium tuberculosis H37Rv
catgtacgtcgccgacgtgccgtactctccgccggtcgcaaatccctggacgagccgacacaaaataagcaggatcggcgcagcgacgccaatgctcgagcgagacggcaccaacgccacgatcagcgaacaggcggccatcagcgacacactgaacgtcagcgcggcccggcggccgcggcggtcggcaaaccgaccaaggaaccacgatccgacgggccgggtcacgaaggtaacagcgaagatcgcgtagacatagaccgtcgagttgcgatcggcccgatcaaagaattggtcctcgaaatacgtagcgaacacggtgtagacgtagacgtcataccactcgaccagattgcccgacgatccccggatcgtgttccaaatggcccgacgggtctcgg

SEQ ID NO: 1612 - DNA, 401 bp, Mycobacterium tuberculosis H37Rv
gatttggccggaccagtcgtcaccaacgcttggcgtgcgcgccaggcgggcgatcagatcgcttgactaccaatcaatcttgagctcccgggccgatgctcgggctaaatgaggaggagcacgcgtgtctttcactgcgcaaccggagatgttggcggccgcggctggcgaacttcgttccctgggggcaacgctgaaggctagcaatgccgccgcagccgtgccgacgactggggtggtgcccccggctgccgacgaggtgtcgctgctgcttgccacacaattccgtacgcatgcggcgacgtatcagacggccagcgccaaggccgcggtgatccatgagcagtttgtgaccacgctggccaccagcgctagttcatatgcggacaccgaggccgcca

SEQ ID NO: 1613 - DNA, 401 bp, Mycobacterium tuberculosis H37Rv
aacgccggcagcggtatcaacaatgcgctgcgggtgccggcacgggcctacgcgataccccgcacaccggccgccggatagcacgaccggtttgcgcggatgcgtcggcgttgttccccgccgcggttggcgtgctctggcaatctggtctaagggacccgaccccaccgggcggaccccacggcatcgaggggctgtcgctggcattcgaaaagccgtcaccggtaacggcattgacgcaggaactacgattcgcgacgaccatgacgggcggcgtcagcctcgcgatctggatggccggtgttacgcgggagatcaacctgctcgcgcaggcctcacaatggcgcaggctggggggaaccttcccgaccaacagccaactcaccaacgagtcagccgct

SEQ ID NO: 1614 - DNA, 401 bp, Mycobacterium tuberculosis H37Rv
tgcgcggatgcgtcggcgttgttccccgccgcggttggcgtgctctggcaatctggtctaagggacccgaccccaccgggcggaccccacggcatcgaggggctgtcgctggcattcgaaaagccgtcaccggtaacggcattgacgcaggaactacgattcgcgacgaccatgacgggcggcgtcagcctcgcgatctggatggccggtgttacgcgggagatcaacctgctcgcgcaggcctcacaatggcgcaggctggggggaaccttcccgaccaacagccaactcaccaacgagtcagccgcttccctgcggctctacgctcaactaatcgacctcctcgacatggtcgtcgacgtcgacatcttgtcgggaacaagtgcgggcggcatcaacgc

SEQ ID NO: 1615 - DNA, 401 bp, Mycobacterium tuberculosis H37Rv
cctttttgcactgctgtctttctcggttgtcggcgcggtactcgcgttggcgacgcccgtcgtacgcgaatggctgttcggcacccagcagcagcccggctgggtaggcactcacgcgtattggcttggcgcccaatggtggcaccccctggtcgtcgtcgggctcatcgcactggtggccatcatgatcgcagcggccaccccaggacgacggtgacgatgcgtgcggtgatccggaattcaggaaccgaggcccgcggcgccgtcagccgccgccaactgatcgagcgcttcgccggtgtagacggcgagccgctgcaggtgtggcagtgtgtcacggcagccgatgaatccaaagttcagcgtgccggcgtaactctgcaaagtaacgttgagagcct

SEQ ID NO: 1616 - DNA, 401 bp, Mycobacterium tuberculosis H37Rv
accgcgggtcaggtgcgtgaccgcgaatccggcgatccgttcaccaccgccatcgagtacggtgccggcgcggaaacggacgcccagaacgtggcagacctgctcggtatcgacgcccccaaccatcccgatcccgccgtcgcgcccggacacatccgtgtgacggtggataccaacttctccctaccggcacccgacgaggccaccgccgccgcgacgtccaccgaaaccagcacatatccgctgtacggcggcggcaccaccaccgacccgacaccggaccaaggggcgcccatcgatggcggcggcgtgccctgcgtgaactaggtaagttatccgaccactccacgcagcccgtcggcgccgaacaccggctccagcatgggcgagaagtccgggcc

SEQ ID NO: 1617 - DNA, 401 bp, Mycobacterium tuberculosis H37Rv
tgagccggcacggctaccgggtcagccccggcacgttgtacccgaccctgcaccggctcgaagccgacggcctgctggtgtccgagcaacgggtcgtcgacggccgcgcgcgccgcgtctaccgggctaccccggctggccgggcagcactgaccgaggatcgccgggcactggaagagctggcccgcgaagtcctcggcgggcaatcgcacaccgctggtaacgggacctgaaccgcgtcgacggtacccatcgccggggccaaaccgtgacgacgtctgcagcgcaatgcgggcttggcttacagttatgtaatgtctaccaaatctgaccacggcgaaatcggtgacgtcgaaccgctggcagacagcaccgcgagccaggccaggcgagtcgtcgcc

SEQ ID NO: 1618 - DNA, 401 bp, Mycobacterium tuberculosis H37Rv
ttgactccggcgcgctcgaccacgctgcccgcgaccgcaacatcaggcgccgggcccgcgagattcgcaccgaactgggaaatccgcgcaagatcctgctcggtgttgaccggctcgactacaccaagggcatcgacgtacggctgaaggccttttccgagctgctggccgagggccgcgtcaaacgcgacgacaccgtcgtggtccagctggctaccccgagccgcgagcgggtggagagctaccagacgctgcgcaacgacatcgaacgccaggtcggccacattaacggcgagtacggtgaggttggccatccggtagtgcattacctgcatcgaccggctccgcgcgacgagcttatcgctttcttcgtggccagcgacgtcatgctggtcacccca

SEQ ID NO: 1619 - DNA, 401 bp, Mycobacterium tuberculosis H37Rv
cgccctcgtcctggggtacgccgcccgccgaggtgatgatcgcggcgaacagcgccgggaaaaccaccaggagctgttcgatcgacttgtgatagatcacgcccacccggcccaggttggccagactggccgccagcgcgggaaacgaaggacgaatcccggagaacgcggtgttggcctcgtcgatcgcatccggggcgtcggccaacgtgtcgcgcagccgcgggtctgccgcacggagctgccaggtgaaccgcgccagcccatcggcgagtgacttgatgtccccgccggcgcggatctgggcttgcaggaacgggccggcctgatcgatcaactgcgaaacctgtggatagttggcgttggcctcatccaccagcaaccgggccgactcgatcagc

SEQ ID NO: 1620 - DNA, 401 bp, Mycobacterium tuberculosis H37Rv
ttaccggacgcgccgtagacggcgagcgagatgaacaaggtgatgacaacaaccacgatcagcgaggtccgtacggcctgcccgaccgcgaccccgaccccaaccgacccgccgctggcgttgtagccgtagtaggtatgcaccagcattaccgcgatcgacatagcgatggcttgcataaacgaccacaacaggtcggaggggatgaggaaggtgttgaagtaatggtcataaaggcccgcggactgcccattgacgaacaccgtggtgaaacgagcggcgaagaacgcggccagcaccgacaacgaatacaacggaatgatcgccaccaggccggcgatcagccgggttgacaccaaataggacaccgagtgcaccgccatgcattcgacggcgtcgat

SEQ ID NO: 1621 - DNA, 401 bp, Mycobacterium tuberculosis H37Rv
tggaccaggcttaccacatgctgcggcgacagcgggtcgatctggcccgcttcgacatcgggtgcggcgccgaagacatcggccgtcatcgcggtgcgcgcccgcggacaaatcacattggcgcaaacgccgtagcgcccgagcgcccgcgccgccgacagggttagcgcggtgatgccagccttggcggcggcgtaattcgcctgccccaccgggcccaccagacccgcctccgacgaggtgttgacgagccggccgaagaccgatcccccttcggcatccttggctttgtcccgccagtaggcagcggcgttgcgggtgagcagaaaatggccgcgcaggtgcaccgcgatcacggcgtcccactcctcgtcggacatgttgaacagcatccggtcgcg

SEQ ID NO: 1622 - DNA, 401 bp, Mycobacterium tuberculosis H37Rv
gggtggcttgcgctgggctggcccaaggaatacggcggccagggccgctcggcgatggaccagctgatcttcaccgatgaagccgccatcgccggtgcaccggtgccgttcctgaccatcaacagcgtggcgccgacgatcatggcctacggaaccgacgagcagaagaggtttttcctgccccggatcgccgccggggatctgcacttctcgatcggctactccgagcccggcgccggcaccgacctggccaacctgcgcaccaccgcggttcgcgacggcgatgactatgtggtcaacggccagaagatgtggaccagcctgattcagtacgccgactacgtctggttagcggtacgcaccaacccggagtcttctggggccaaaaaacaccgtggcat

SEQ ID NO: 1623 - DNA, 401 bp, Mycobacterium tuberculosis H37Rv
ggtcgggtacggcccggtggccgacgcatttctggtacccgccgaaaccgattccggtgcagccgttttcctggttgccgccggcgacccaggggttgcggtgaccgcactggccaccaccggactgggcagcgtcggacacctcgagctaaacggggccaaagtggacgccgcccgcagggtcggcggaaccgatgtcgcggtttggctcggcacgctttccaccctgagccgcaccgcttttcagctcggtgtgctcgagcgcggactgcaaatgacggccgaatatgcgcgcacccgtgaacaattcgaccgcccgatcggcagcttccaggcggtggggcaacggttggctgacggctacatcgacgtcaagggattgcgactgacgcttacccagg

SEQ ID NO: 1624 - DNA, 401 bp, Mycobacterium tuberculosis H37Rv
accgattccggtgcagccgttttcctggttgccgccggcgacccaggggttgcggtgaccgcactggccaccaccggactgggcagcgtcggacacctcgagctaaacggggccaaagtggacgccgcccgcagggtcggcggaaccgatgtcgcggtttggctcggcacgctttccaccctgagccgcaccgcttttcagctcggtgtgctcgagcgcggactgcaaatgacggccgaatatgcgcgcacccgtgaacaattcgaccgcccgatcggcagcttccaggcggtggggcaacggttggctgacggctacatcgacgtcaagggattgcgactgacgcttacccaggcggcctggcgggtggccgaagattccctggcaagccgggagtgccc

SEQ ID NO: 1625 - DNA, 401 bp, Mycobacterium tuberculosis H37Rv
cataccgggcactggcacagagcctgccgggggcaccggcgccaaaggtggagacggcggcgacggtggcgccggcggcgcaggcggcaatgccggcggggccggcggccagggcggcaatgccggccagggtggcgccggcggtgcgggcggcaacgccgtgattcccggcgacggcgtcgggaaggcgccgcacggcgacgcgggcggcagcggcggagacggcggcaaaggcggccagggcggtagtggcggcaccggcggatccggtgccccgatcggtggcggcgccggaggcaccggagggtccggcggacacgccggcaagggtggcgccggcggcatcggcgcacagggcaccaccatcaccgtgcccgggaacggcggcaacgccggcgacg

SEQ ID NO: 1626 - DNA, 401 bp, Mycobacterium tuberculosis H37Rv
ggcggcgacggcggcgccggcggcgccggcggggccggcgggcgtggcggcaagggcatcgacggcgggttcggcggtgacggcggcaacggcggcagcaacaacggcaccggcgccggtggcaacggcggcaacggcggcaccggcggggtcggctcggttggcgcggctggtggcgatggcggcaacggcggcaccggcggcttcgccggtttcggcggcaccgcaggcaatggcggttccggcggcacgggcggggccggcggcgacggcggcaccggcggggacggcggcaacggcgttatcgccggcggcggggggaccggcggcaacggcggcgccagcggggccggcggcgccggcggcacgggcgggttcgccggcaacggcaatgccggcgg

SEQ ID NO: 1627 - DNA, 401 bp, Mycobacterium tuberculosis H37Rv
caacggcggcagcaacaacggcaccggcgccggtggcaacggcggcaacggcggcaccggcggggtcggctcggttggcgcggctggtggcgatggcggcaacggcggcaccggcggcttcgccggtttcggcggcaccgcaggcaatggcggttccggcggcacgggcggggccggcggcgacggcggcaccggcggggacggcggcaacggcgttatcgccggcggcggggggaccggcggcaacggcggcgccagcggggccggcggcgccggcggcacgggcgggttcgccggcaacggcaatgccggcggcaatggcggcaccggcggcgcgagcgaggacggcgacaacggcaacgctggcagcggcgccaccggcggtaccggcggcaacggcg

SEQ ID NO: 1628 - DNA, 401 bp, Mycobacterium tuberculosis H37Rv
aatagccaccctgtcgtaaccgatccaacatcatttcacctcaaatacgtgtgttcaactggcgtctcgctggatggtagatcaccgctagctggtccagtatgccgcctgccatgagcttgggaccagtgtgatctgcttgtgccagggggaggacgggaccaccttgattgccagtcacgggaccacggcgcgccgcgtcggtggtcttttcgcttattcgtgcgatcgtcgtgacagctcaagtcacgggaggcggcgggcatggcttttcgggaggtcagtatgaacaagatcagggaagtgctgcgggtctggctgggggtggccgggttgccggccccggggtgccgcacgatcgccgcgcattgcggtatggaccgcaagacggtgcggcgcta

SEQ ID NO: 1629 - DNA, 401 bp, Mycobacterium tuberculosis H37Rv
tagccgggtgcaacggaattgacgcgaattccctgctcgcccagttccgtggccagcgaatgcgacatagctagcagtacggacttggccatcttgtaggtgccgtatttcggctgcgagtgccggatcaccatggagttgacgttgacgatcgcgccgtgagactgcgccagcgcgggcgtaaacgcctggatgagtcgtagcgtccccagcgcgctgagctctatcgcgtcacggatgtgctcaaatgtggtgccggccaatggtttcatcgatggcacccggaacgcgttgttgatcagcacgtcggccttgccgtacgccgccagcgtggcctgcacaaggttgcttacgtcgtcgtcgtcggtgatgtcggtgcgcaccgccaccgcccgtcgccc

SEQ ID NO: 1630 - DNA, 401 bp, Mycobacterium tuberculosis H37Rv
ggattctgctcggcgaccacgatgcgcaccttgccatccgggtccgcttgggcctggctggcattcaacgaggtctgatgattgatatagtccagcgagatgtaccacatgctgcccaactgaaaccctaagtagggggcgtcgctcaccggcaccgtgatcaccagcgcttgacccggccgcagctcgaaatgaccggccgacgagtattgggtggccaggccaccgggagtcaaccgaggcgccaccatggtgttaaccgggatattgaggtagaaccactggggaaactgtaaccaggttttcacccggttcacaagctgggatcccgctgtggcataacgcttttccatgagctcgcgagtcagcggcggcggcgcggtgccgacggtgtccagcct

SEQ ID NO: 1631 - DNA, 401 bp, Mycobacterium tuberculosis H37Rv
agcggcggcggcgcggtgccgacggtgtccagcctggcgatggccagcgtgccgcgctgttgtgaccaatcgccgtacacctcccggatcactagttgcccgggagcgctgggccgcaaccgccattcgaagctgccgtccgcggcgatgtcgagctcacggtcgtcgaacgcggcctggctggccggcacgttatagtcggtgtactcgccgccgagcagctgaaagctcaggtcggtggtggtgccgcgccgtccgctgaccacatagtcgcggttggcctgcagccgggtgccgaagtagagggtgtcggggttgtccaggcccatcttcgtgaacggccctgttccggactgcaggaacgggtggtcacgctcgtagtcgaaggccaggtgcatgca

SEQ ID NO: 1632 - DNA, 401 bp, Mycobacterium tuberculosis H37Rv
gggatgacctgcaaggcgatcgtcgatgcattgctggactccgatgcgacggccgtggccggctacggcgcacgctttgctggcgtggcgtacccgggcgagacgctcacggtcaacgtgtggaaggacggccgccgcctggtggccagtgtcgtcgcacccactcgtgacaacgctgtggtgctcagcggagtggagctggtgccggcatagcggtgcggtcggcgctaaaggtttggtgagactgcggatttcgcagaagtcgacatgacattgctgctatggtctgcggtgacggggccgtcgcagtggtggcgcggcggttgggccgagccggcgggatgttgtcatggcggatttcttgacgttgtcaccagaggtgaattcggcccggatgtacg

SEQ ID NO: 1633 - DNA, 401 bp, Mycobacterium tuberculosis H37Rv
ttccgcagtgggatcgaaatccattagtgagcaaccgggcatctaccggtgtagtcgacctgccagtgcttaatgccgttgagccagccggaccgcagccgctcgggcgccgagatcggcttgaggtcgggcatgtggtcggctacggcgttaaagattaggttgatcgtcatccgggccagattcgcaccgatgcagtagtgagcgccggtgccgccgaagccgacgtgcgggttggggttgcgcaggatgttaaatgtgaacggatcctggaaaacctcttcgtcgaagttagccgaccggtagaacatcaccacccgctgacccttcttaatctgtacgccggacaactcgtagtcccgcagcgcggtgcgctgaaaagcggtgaccggggttgccca

SEQ ID NO: 1634 - DNA, 401 bp, Mycobacterium tuberculosis H37Rv
cagctcggccggatcccatttcacgcccttgtccacctgcgggccatgcgcccagccctcggcgacccggatgatgccgccctcgacctcgaataccttcccagtgacatcgcgggactccgcactgcccagccataccaccaagggtgagacgttctccggggccatcgcgtcgaacccctcctgcggcttggccatcatctccgcgaacacagtctcggtcatgcgggtgcgcgccgccggcgcgatcgcgttgacggtcacgccgtaccgcctcatttcggcggcgccgacgagcgtcagcgccgcgattccggccttggcggcgctgtagttgccctgccccacgctgccctgtaggcccgcgccagagctggtgttgatgatccgcgcgtcaatgt

SEQ ID NO: 1635 - DNA, 401 bp, Mycobacterium tuberculosis H37Rv
cgggtggcccgcgacatcgccgccaaagacacccgggtcatccgcgccgccaaggaggcgctgaacttcatcgacgtgcaacgggtcaatgcgagttaccggatggagcaaggttttaccttcgagctcaacctcgccggagtcgccgacgagcaccgcgacgcctttgtgaagaagtcatagtgcccgataaacgaaccgctcttgacgacgccgtcgcgcaattgcgcagcggcatgaccatcggcatcgccggctggggctcgcggcgcaagcccatggcgttcgtgcgggccatcctgcgctcggatgtcaccgatttgacggtggtcacctacggcgggccggacctggggctgctgtgctcggcgggcaaggtcaagcgggtctactacgggttc

SEQ ID NO: 1636 - DNA, 401 bp, Mycobacterium tuberculosis H37Rv
tcacacccgacgacaccattcgtcgccgtcgactacgacgcctaggttcgtggcgccgccccatacttgcgccgactgtgaatctgacgacgcgacacgccgattcgccgtcgtgtggttcactctcggcgctcatgggcgccatcccgccgcccgcatcgcggcatcgacgcggccaacgaacgtgccccggcggtaccagagcagctcactggtgaccctgatgatcgtccagcccagatccagcaacgcggtggaccgctcgatgtcccgagcccgctgcgccgggtctgtccaatgctgtggcccgtcatactcgacaccgactcgcaattgctcgtagcccaggtcgatgcgggcgacgaagtccccgtagtcgtcaaacactctgatctgtgttt

SEQ ID NO: 1637 - DNA, 401 bp, Mycobacterium tuberculosis H37Rv
tcacgggacaggttccacttctcggcgatcagctccgagccacggaactgtgaaatctcctggtcgccataccggtgtaaccattgcttggattcgttggtcggcgaggtgaacccgaactgttcgcccacggtcatcgccgacgagatcgggatctggctcatgttctgcacgccgccggccacgatgacatccgccgtgccggacatgatcgcctgcgcgccaaaggaaatcgcctgctggctggatccgcactggcggtccacggtgacaccggggacctcttcgggatagccggcggccagccacgacagtcgggcgatgttgcccgcctgtccgccgatggcgtcgacacatccggcgatcacgtcgtcgacggcggcggggtcgatgtcggtccg

SEQ ID NO: 1638 - DNA, 401 bp, Mycobacterium tuberculosis H37Rv
cgggcctgtttaacatgggcaccgccatatcggggttgttcaacctgcgccagctgttggggtagcgcgacactcacgggtgctggcaggataccgaaatcacctcaccagtcaggtaactcgagtagtcgctggccagaaacgcgatggtggccgccacctcccagggctcggcggcccggccgaacgcctcgccggccgccagccggtccagcagctcggccgaggcggtcttgtccaggaacttgtgccgggcgatgctgggcgagacggcgttgatccgcaccccatactcggcggcttcgattgcgctgcaccgggtcaacgccatcaccccggccttggcggcggcatagtgcgactgcgaatgctgggcccgccagcccagcacgctggcgttg

SEQ ID NO: 1639 - DNA, 401 bp, Mycobacterium tuberculosis H37Rv
cgttgcgacgacgtgcgggcggccgttcgccgactttgagttgcgcattgcggacgacggggaagtgttgctgcgcgggccgaacgtcatggtgggctatctggacgacacggaggcgaccgcggccgccatcgacgccgacggctggctgcacaccggcgacatcggtgccgtcgaccaggcgggcaacctgcgcatcaccgaccgcctgaaggacatgtacatctgcggcggattcaacgtctatcccgccgaggtcgagcaggtgctggcccggatggacggcgtcgcggacgccgcggtgatcggcgttcccgaccagcggctgggcgaggtcggccgggcgttcgtggtggcgcgccccggcacgggcctcgacgaggcatcggtgatcgcttaca

SEQ ID NO: 1640 - DNA, 401 bp, Mycobacterium tuberculosis H37Rv
tgtggcgcccggccgcaaggtgtggcagcagttggccaacctgggcgtcaccgcgttgggcgtagcggagaagttcgacggactgggtgccagtccggtcgatctggttgtcgcgctcgaacgtctcgggcgctggtgcgtgcccggcccggtcaccgaatccattgccgtggcaccgattctgctggctcatgatgatcaggctgaacgcagccatgggctagcttccggtgagctcatcgccaccgtggccatgccgccgcgggttccgcgcgccgtcgacgccgacaccgccgggctggtactgctcgcgggcgatggcagcgtcaccgaagggacgccgggtgattgccaccggtccgtcgaccccagccggcggctgtatgaggtggcggcatccg

SEQ ID NO: 1641 - DNA, 401 bp, Mycobacterium tuberculosis H37Rv
cgtcaactacgccaaacagcgcacgcagttcggccgggcgatcggctcgtatcaggccatcaagcacaaactcgccgacgtgcacattgcgatcgagctggcctgccccctggtttacggcgcggccgtgtcactcgagccgcgcgatgtcagcgccgccaaagccgccgcgagcgaggcggctctgctggcggcacgctgggcgttgcagacccacggcgccatcgggttcacctgcgagcatgacctgtcgctgtggttgttgcgggtgcaggcgttgcactcggcctggggtacgccgcaggagcatcggcggcgtgtgctggaggcgctatgaccccccctgaagaacggcagatgctacgggaaaccgtcgcctccctggtggctaagcatgccgg

SEQ ID NO: 1642 - DNA, 401 bp, Mycobacterium tuberculosis H37Rv
caatgctgctccttgacgtaagcgtctgcatattcgccatccgcgaggacagctgccccaaccacgcgacataccggacgtggctcaccagactgcttaccggcgacggcgagcagacgcaaaatcgcccaacacgcccgcaaaatgggcgattttgcgtctgctcgcgccactagagccaggtgtcctgggtggtggtgatgaggaaagcctccaggtcgtcgcgccagtgcgccggcgtggtcttttccggctcgatgccggtgtagtcgccgcgatagaacagcagcggccgcggcttgaccgccgggacctctgacagtgactcgacggcaccgaacaccacgaagtgatcgccgccgtcgtgcaccgacgccaccgtgcagtcaatgtaggccagc

SEQ ID NO: 1643 - DNA, 401 bp, Mycobacterium tuberculosis H37Rv
gggtggccgacatcggcaccttgcgccgcaacgcccggtccaggcacaggcccacgtcgtcggcctgctcgacctcgaccatcaggtgcacgatgccgctggacgtcggcatcggcaggaaggccaacgagtggtgacgcgggttacagccgaagaaacgcagccaggctggcggcccgtcggcgggccgccctaccatctgtggcggtagccgcatcgagtcacgcagccgaaagccgagcacgtctcggtagaaatgcaacgcctcagcatcgtcgcgggtggacagcaccacatggcccataccctgctcaccggtgacgaacctgtgcccatacgggctgaccactcggcggtgttccagcgcggtaccgtggaagacctccaggcaattgccggaa

SEQ ID NO: 1644 - DNA, 401 bp, Mycobacterium tuberculosis H37Rv
ccacccggtggaaccacacacgctcgccagtcgacgcgtcgcctcgaagaacagcgcagggtcgcactgcagtccgccccactgctgcggctgcaacagggtgaagaagccgacgtcgtcgagcgccttgacggtctcgtcgggcagccgccgcagatcctccgtggcctgggcgcgatcccgaatctccggcagcagattatcgatggcagccaagacagactgagcatcacgctgttgaatggacgtcacttacttttgcctctccgggttgcgaacttagagaaagactagaacacgttccgatttgtgtcgagctaggtattcctgcggcaggtagcgataccaaatgggttttctgtaacatgttctagttatgacggaagagaggacgggtcttg

SEQ ID NO: 1645 - DNA, 401 bp, Mycobacterium tuberculosis H37Rv
tgcttctcgacttgagccagatcaatgccgcgctgggtgcgacatcgatgaaggtgtggttcaacgccaaggcaatgtgggactggagcaagagcgtggccgacaagaattgcctggctatcgacggtccagcacaggaaaaggtctatgccggcaccgggtggaccgctatgcgcggccaacggctggatgacagcatcgatgactccaagaaacgcgaccactacgccattcaagcggtcgtcggcttcccgaccgcacatgatgccgaggagttctacagctcctcggtgcaaagctggagcagctgctcgaaccgccggtttgtcgaagtcacccccggacaggacgacgccgcctggactgtggctgacgttgtcaacgacaacggcatgctcagt

SEQ ID NO: 1646 - DNA, 401 bp, Mycobacterium tuberculosis H37Rv
tggcgctgcgaagtctgcggcgtggacacacttcggtgctgcggatcgcgcgcgccgtcaacgtgtcgttcctggtctttgtgttggccctgggtgtcgtggtgcacgcggtcatgctcaacggcatggccgccaggatgtccgccgtgctgccgaccgggtccgggttgcccgcgctgctcggcatcgccgcgctggccgccgtgctggccaacgtggtcaacaacctgcccgcgactctggtgttagtgccgctggtggcggccggcgggccggcggccgtgctggccgtgctactcggggtcaacatcggacccaacctgacctatgccggttcgctgtctaacctgctgtggcggggcgtgctgcgccggcacaacgtcgacgccagcgtcggcgag

SEQ ID NO: 1647 - DNA, 401 bp, Mycobacterium tuberculosis H37Rv
gcgagtacacccgactgggactgtgcaccgtgcctgcggccctggcgatggcggtgctcgcgctgtgggccagcgcccaggttctggggatctagccgcaagggcgcgagcagacgcagaatcgcatgatttgagctcaaatcatgcgattctgcgtctgctcgcgaggctcgcgtggccgccggcgctggcgggcgatctcggcgagcaccaccccagcggccaccgaggcgttcagtgattcggcctgagcggccatcgggatggacaccacctcgtcacagttctgccttaccaaccgggacaaccccttgccttccgacccaacgaccaccaccaacgagtcagtgccatctacatcgtcgagcgcggtgccgccaccggcgtccagtccgatcacc

SEQ ID NO: 1648 - DNA, 401 bp, Mycobacterium tuberculosis H37Rv
caccacctcgtcacagttctgccttaccaaccgggacaaccccttgccttccgacccaacgaccaccaccaacgagtcagtgccatctacatcgtcgagcgcggtgccgccaccggcgtccagtccgatcacccgcactccacgatcggcccagcccttcagcgtcctggtgagattggtggcccgggccaccggaatccgggccgccgccccggcgctggtgcgccacgccaccgcggtcaccgacgcagaacggcgttgcggaatcagcaccccatggccaccgaacgcggccaccgaccgcacgatcgcaccgaggttgcgcgggtcggaaaggttgtccaaagcgaccagcagcgcaggcggttggtcgagggcggcggccagcaggtcatcgggat

SEQ ID NO: 1649 - DNA, 401 bp, Mycobacterium tuberculosis H37Rv
gccgccaccggcgtccagtccgatcacccgcactccacgatcggcccagcccttcagcgtcctggtgagattggtggcccgggccaccggaatccgggccgccgccccggcgctggtgcgccacgccaccgcggtcaccgacgcagaacggcgttgcggaatcagcaccccatggccaccgaacgcggccaccgaccgcacgatcgcaccgaggttgcgcgggtcggaaaggttgtccaaagcgaccagcagcgcaggcggttggtcgagggcggcggccagcaggtcatcgggatgggcgtagttgtacggtggcacctgtagcgcgatgccttgatggaggtggttggcggtcatccgatccaggtcggcacgtagcagctcgacgatcgcaatccctg

SEQ ID NO: 1650 - DNA, 401 bp, Mycobacterium tuberculosis H37Rv
ggctcgttccggcgtgcccaggaccaccccgttggcatccacggccttgatggtgtcagaaagcggcagtacgggaacgacggcggcataaccgtcccgcaacgcctcgaccacccgggcgaccagggccggtggtgtcagtgcccgcgcggcatcatgcacaagcacaaactccggctccgcggtcccggacagcactgtcagcgccaggttcacggtgtcagtgcgattcgacccacccgccacaatcatcgccctgtggccgaggatctgcctcgcctcgtccgtacggtcggcgggcacggccacaacaacggtgtcaactacccccgaatccagcaggccatcgacggcccgctcaatgagagtctgcccgtcgagctggtaaaacgccttgggca

SEQ ID NO: 1651 - DNA, 401 bp, Mycobacterium tuberculosis H37Rv
tcgacgagttgctcggcggcaacgacaccgcccgggaattgatcgtgcgcgattaccacgccaacccggaaccaccgtccacggggcaaatcaatgccaccctggacgaactggacgccctgtcggacggcgacctcctcgatttcaccgcgctggcaaaggttttcggatatccgacgaccacggaagcgcaggattcgacgctgagcccgcgtggctaccgcgcgatggccggtatcccccggctccagttcgcccatgccgacctgctggtccgggcgttcggaacgttgcagggtctgctggcggccagcgccggcgatctgcaatcagtggacggcatcggcgccatgtgggcccgtcatgtgcgcgaggggttgtcacagctggcggaatcgacc

SEQ ID NO: 1652 - DNA, 401 bp, Mycobacterium tuberculosis H37Rv
ccgacgaccacggaagcgcaggattcgacgctgagcccgcgtggctaccgcgcgatggccggtatcccccggctccagttcgcccatgccgacctgctggtccgggcgttcggaacgttgcagggtctgctggcggccagcgccggcgatctgcaatcagtggacggcatcggcgccatgtgggcccgtcatgtgcgcgaggggttgtcacagctggcggaatcgaccatcagcgatcaataattatccgccttgcgcgggagactccggcggaggcgcctgcgctggacccggagcgggtaccggcccgggcggcggcggcggctgattcaggatgaacggaaccggcagcgagcgcagattgcccagttgtaccacgagattgtaggtgcccggcccga

SEQ ID NO: 1653 - DNA, 401 bp, Mycobacterium tuberculosis H37Rv
gaccgtcacggcggccgagcaggaccgacggcgcaaccctttccacgacgtctcgcacgtagccgcctggcagggtgccgtcgttgatcgcggccaaagcggcgttcacggcgccgcagctgtcgtggccgaggacgacgatgagcggcacattgagcacggtcaccgcgtactctatggagcccagcacggccgagtcgatgacatgcccggcggtgcggaccacgaacatgtcgcccaggccttggtcgaagatgatctcagcggccactcggctgtccgcgcagccgaagatcaccgccgtgggcttctgcccggcggccaagccggctcggtggtcgacgctctgactgggatgctggggccggccggcgacgaatcgctcgttaccctctttgagt

SEQ ID NO: 1654 - DNA, 401 bp, Mycobacterium tuberculosis H37Rv
ctcctcttacggcgcgcaacaagacatccgcattcataccgacgacgacggctgggttgaccgattcgacgtcgaaacgcaggcgccgtcgatcgcttcgtggcgcgacgtcgacgcggcgctgagcaagaccggcgcccgctactcatttcaggtggcaaaggtcgacaacggtcgctgcgacccggtggcgggcaccaacaccggcgaatccctgccgctggcatcgatcttcaagttgtacgtgttacatgcgctggccggtgcggtccagcacaacacggtgtcctgggatgatctgctgacggtcaccgccaaaagcaaagccgtgggctcttccggcctggaactgcctgtgggggcacgtgtttcggttcgcacagccgccgagaagatgatcg

SEQ ID NO: 1655 - DNA, 401 bp, Mycobacterium tuberculosis H37Rv
gaaacgcaggcgccgtcgatcgcttcgtggcgcgacgtcgacgcggcgctgagcaagaccggcgcccgctactcatttcaggtggcaaaggtcgacaacggtcgctgcgacccggtggcgggcaccaacaccggcgaatccctgccgctggcatcgatcttcaagttgtacgtgttacatgcgctggccggtgcggtccagcacaacacggtgtcctgggatgatctgctgacggtcaccgccaaaagcaaagccgtgggctcttccggcctggaactgcctgtgggggcacgtgtttcggttcgcacagccgccgagaagatgatcgccaccagtgacaacatggccaccgacttgctgatcgaaaggctgggcacccgcgccatcgaggaagcgctggc

SEQ ID NO: 1656 - DNA, 401 bp, Mycobacterium tuberculosis H37Rv
cttggccagatccggctcggccggcggcttgcgggtaccggtgaaggtgaacaccgcgtcctcgccgggaccttcaccgtcccagttgtccacgtcgacggtgaccacctgacccggcccgacctcctcgaagaggatcttctccgagagctgatcttcgatctcacgctggatggtgcgccgcaacgggcgggcccccaacaccgggtcgaagccacgcttggccagcagcgccttggccgcatcggtcagcaccagcgccatgtccttgctcttgagctggccggcgacccggctgatcatcaggtcgaccatccggatgatctcctcgcgggtcagctggtggaagacgatgatgtcgtcgatgcggttgaggaactccgggcggaagtgtttcttca

SEQ ID NO: 1657 - DNA, 401 bp, Mycobacterium tuberculosis H37Rv
tcggcgcgctgcagcgcgacccctagcgcggtgccgacccggccagccgagatgatccccaccttgagcctggccggacgcaaaccgtcgaaccgctccatagcagacggcctcacaggtttcttggttcgttccagtcccatgcccgggtaccggacggtcaccaagactgtagtcgatttgcacgtcaagacccacccggggcactgctgatttggtcactacaccaacagtgtcggttgccggcggcaatcgggcgggtacaccctggcacaagcggcgccgctattcaccgcggcggcgacgccggccgcctccggtcgactcgacctgaagcctcgccataaggtcggcgaccgactggccgccggttagcgggtcccgcgcatgcaaaccaccgg

SEQ ID NO: 1658 - DNA, 401 bp, Mycobacterium tuberculosis H37Rv
gcggcggtggcggagcctcataatgccgcggtcctccgctcaccggtggtacccccacctccggcacatcgatgatcgaggcctcgtcggtgcggctggcgccatcacccccgcggaccgccataacccgatcgctggatacccagtccgcgggagggctctcgccatcgagggcacgcgcggccctggcctctttctccacggtccccagcgccggacggtgctcgaggtcggcgtcgaacaaaatctccaggctggttcgcagcgcggccagttcggcccgcagggctgctacctcgtcggcggccggagcgcgcaactccgaggccagctcgcggcgcagctgagattccagggtcagctcgtactcccggcgcgccgaaatctcgcgatccaactga

SEQ ID NO: 1659 - DNA, 401 bp, Mycobacterium tuberculosis H37Rv
tcatagaccagcttcaggtcacgcacccgggcctgatccacgtcgctttgccggcggtaaagcaccgacacaaacgcacccgcgaccgccgcccacagcgccagcagaacagcgagcttgagaagttccacgcgatcggtgaaaaccaatgcggaactggccccaatcgccaggaccagcaacgccgtcaaaagcacccaacccggcctgcggccgccgcgccggacccgggcgccgcgggacagaacggtcatggcctgactgtacccgggcgaggtcaatccgcgtgtcgcgccggtccggcgattcccgcatggcttagccgggtaggcagttcggccaaattcgccgcgtagacaaccccgcattccgggtcggccgcccggccagcaacgtcgacg

SEQ ID NO: 1660 - DNA, 401 bp, Mycobacterium tuberculosis H37Rv
agcgcgctgcccgccgccaccaccgtgccagtggtgtcctcggcggccgcccgcagccatgaccgccgcggcaggaagtacgccagcaccccgatccaccaccccgtcaccagcgcacccacccaggccgaggccttggctaccatcaagctgcgcgccaccacaagcgggtgcagccagccgggcccgtctccgatctcgccatcgctgatcttgacccgcacgtagcgagcccacaacgcctcggcgaccgcgaccgcgagcaaggacaagcccgtccacaccgtgatcggcggaaaccaccggtaaagcaccgccaccaacagatatcccaccgccgcggcgccgaccaccgcggcggtcagatcacgttttcgggtcggtcccatcagctttccggt

SEQ ID NO: 1661 - DNA, 401 bp, Mycobacterium tuberculosis H37Rv
acatggtcaatccggccgtccatcagcgtcgataccgacaccgtgcgtgggggattcgtcacggtaaaaagcgcgatctcttgttcggtgtccgtctccgcctgaccgtgggcattgtccaggtcgggtccggtgtccggggtcgccgccgacccgacgccaataatcggatccgcagtccagccctccgcgccgtcggcaccccagagatccacggcgtcgaaatcgttgctgtcaaagtcatttccgggcaagtccaccgtcccttcggaattcattgccacccgggaagggtcggcctgggcagctggcgtggtcagtccgaacaggtcgttgggaagacgctgtggcctgcactgcgggcagcaaacgtggtcaggtaaacaacccgtcgatagcct

SEQ ID NO: 1662 - DNA, 401 bp, Mycobacterium tuberculosis H37Rv
tgtcaaagtcatttccgggcaagtccaccgtcccttcggaattcattgccacccgggaagggtcggcctgggcagctggcgtggtcagtccgaacaggtcgttgggaagacgctgtggcctgcactgcgggcagcaaacgtggtcaggtaaacaacccgtcgatagccttgcgccacgcttcgtcggcctcgctatatatcttcgccgcaattcgaagacttttggcgagatcgacaccggccgtatgcaaggacgagcccagggcattgtgggcagtcaagtacacatttaacgtgtcgttgaactgtgagcagtacggaccgtgagtgatcgccacagattcgcctaggccagcggcagcttcgacgcccgaggaggcatcgaccgccgcgttgtcatg

SEQ ID NO: 1663 - DNA, 401 bp, Mycobacterium tuberculosis H37Rv
cggtcacccaccccgtgagcttgtcccaaagctctttcaggccgttgagcgcgtttgtgatgaactcccacacttctccgagggtgcccttgatgatgtccgccacatccgaaatgatgtccgcaatggcggccgcgaccaactccgccaatttggcaagcaatttgaggagttgagtcgcgttgatcagcgttttcacgaccaagtaggcaagcgcgccgcccactacggccatcgcgcccgcgcaaaacggcgcctggaaggcggccgatagggcgtgcccgacgaccgggatgtaggtcaggtccacagccaccgggcgcacgaactcgagacctttcttggcgccctccaggatgtcgcgggtcgtctggaccgcgttggcctggtcgtggatcagg

SEQ ID NO: 1664 - DNA, 401 bp, Mycobacterium tuberculosis H37Rv
catcacccggaaacgctgctgccagctcctccagggctttttcgaagtactctagtgaggagtaaaggatacccccttggttgggtattccaatccccagaaggtcgtacaagccgtcaatggcactgatcgttggatcgatgatgaacgctctgctcatgcctgccgcctatctcaacggtcgtcgattccatgcatagccttggttctgcattgcacgcgtagggcctacagtctggctgtcatgcttggccgatgtcaacagtttttttcatgctaagcagatcgtcagttttgagttcgtgaagacggcatgttcacttgttgtcgactacatcgtctgcgcacatttgccctcctgcaactgcgctgcgacaatgcgccaaccgccgtgtaggcgg

SEQ ID NO: 1665 - DNA, 401 bp, Mycobacterium tuberculosis H37Rv
gctgccagctcctccagggctttttcgaagtactctagtgaggagtaaaggatacccccttggttgggtattccaatccccagaaggtcgtacaagccgtcaatggcactgatcgttggatcgatgatgaacgctctgctcatgcctgccgcctatctcaacggtcgtcgattccatgcatagccttggttctgcattgcacgcgtagggcctacagtctggctgtcatgcttggccgatgtcaacagtttttttcatgctaagcagatcgtcagttttgagttcgtgaagacggcatgttcacttgttgtcgactacatcgtctgcgcacatttgccctcctgcaactgcgctgcgacaatgcgccaaccgccgtgtaggcggcgcgatcccaaggcagt

SEQ ID NO: 1666 - DNA, 401 bp, Mycobacterium tuberculosis H37Rv
cccccttggttgggtattccaatccccagaaggtcgtacaagccgtcaatggcactgatcgttggatcgatgatgaacgctctgctcatgcctgccgcctatctcaacggtcgtcgattccatgcatagccttggttctgcattgcacgcgtagggcctacagtctggctgtcatgcttggccgatgtcaacagtttttttcatgctaagcagatcgtcagttttgagttcgtgaagacggcatgttcacttgttgtcgactacatcgtctgcgcacatttgccctcctgcaactgcgctgcgacaatgcgccaaccgccgtgtaggcggcgcgatcccaaggcagtgtctccgacgtcgatgcctgcgcttcgccttcgatcggtatgagatctgttgca

SEQ ID NO: 1667 - DNA, 401 bp, Mycobacterium tuberculosis H37Rv
gtccctgggggttctggccgccggccaccacccgcgtgctgatccgggcctgtcggtccagtgtcagcagagccgccgccgccgtcaggattttgttggtcgaagccggcaccaagggcacgtcgtctagccgctgccaaagttcttgtccggtcagggcatcggtgatccgacctgctaacttgcccagatcaggatcggccgccaccaccgcaagcgccgcggtcacgccagcggcactcggtgtcgcagcggtgtccgccacagggaccactcccgccttgactgtgggtggccgcggtggaggcgcaggtgcgcgcacgccagcccggtgaccaccagtagtgaccagcgctgcggccgccaccacaacggcgacaaacgccagcacggccgcgccg

SEQ ID NO: 1668 - DNA, 401 bp, Mycobacterium tuberculosis H37Rv
gcaccaagggcacgtcgtctagccgctgccaaagttcttgtccggtcagggcatcggtgatccgacctgctaacttgcccagatcaggatcggccgccaccaccgcaagcgccgcggtcacgccagcggcactcggtgtcgcagcggtgtccgccacagggaccactcccgccttgactgtgggtggccgcggtggaggcgcaggtgcgcgcacgccagcccggtgaccaccagtagtgaccagcgctgcggccgccaccacaacggcgacaaacgccagcacggccgcgccgacgaccacgtgcgtggatttccgccagcgtgtgggacccatgagctctcctgcctttccggtcccattctgccgaaccggccgggcgacgctgccacggtaccggctc

SEQ ID NO: 1669 - DNA, 401 bp, Mycobacterium tuberculosis H37Rv
ggcgttgtcgaacgacagcgatacctcaaggagcgccagaaccgccagcaagaacagggcggtcggcccgccgtgcaaatatccggtaaccaacgccaccaccgtcatcagcagcgagaagccgaagatgcggaacgttgacatggatccttccgaggaaaaaccccacaatagcgacgaaccgacatcaattggtcaggctcgcgccgcgcagcgcggccaaccggcccgcctactattttcagtcgtgacgatccatgtcggttggccgttggcgccgccgcggtgaccgaagtcggcgatacggcatctcctgttggctcctcgggcgcctctggcggagctatcgcaagcggcagcgtagcccgggtcggcacggcggccgcggttaccgcgctgtg

SEQ ID NO: 1670 - DNA, 401 bp, Mycobacterium tuberculosis H37Rv
cgccgcggtcgcggccgcactgcaccgggcgtattcgctgggctgggttggtgcgacggttgggtcgggcttgttgctgctgctgccgctgtccttggagacccgcaccgtggtcgcgttgttatgcggtccgctggtgggaatcggcgtccatttggtggcgctggcgcggacggacgagtaagcggccgatcagccccggaccaacgtgtaacttgtgggcttaaatggcctcgaaaatggacactgaaacgcactactcggacgtctgggtcgtcattcccgccttcaacgaagccgccgtgatcggcaaggtcgtcaccgatgtgcggtcagtcttcgaccacgtcgtctgcgtggacgacggcagcaccgacggcaccggcgacatcgcccggcgg

SEQ ID NO: 1671 - DNA, 401 bp, Mycobacterium tuberculosis H37Rv
gaacgtttccacgactacctggagcgggcgttcttgccgggtcgggtctttgcctctccggcggatttcaatacccagttgcaggcctggctggtgcgggccaatcaccgccagcaccgagtgctgggatgtcgaccggcagatcgcatcgaggccgataccgcagcgatgctgacattgccgccggtcgggcccagcatcgggtggcgaacctcgacacggctgccgcgcgatcattacgtgcgcctcgacggcaacgactactcggtgcatccggtcgcgatcggccggcgcatcgagatcaccgcagatctgagccgggtccgggtctggtgtggcggcaccctggtcgccgatcatgaccgcatctgggccaaacaccagacgatcagcgatcccga

SEQ ID NO: 1672 - DNA, 401 bp, Mycobacterium tuberculosis H37Rv
tgaactgtccggggcgggcactgtcgcgtagcgagcccacgtggggccggggtcggcccgccaaaaacgccccggcgcggccagctcatgagcgggtacgcaagctcaagcagatctccgtagccgtgacggagtgcttcatcgatgtccgcagcgatggcagcggccagtgcgtgcctaaacccgtcttgcgcagagtctttcgcagcgggcgggtagttgcacgtcgtcgccgaagtgctgacgatcccgttgcggtcggagaccgcgagtagccagcgcgcgtccggggcagcatctcgcgcagcacgctgaagtgtcgcggcaccggaagccgggggcgtgaagagacccgccatgacaccggctggacggcgcggggcagagtcccgcggagtggt

SEQ ID NO: 1673 - DNA, 401 bp, Mycobacterium tuberculosis H37Rv
tcacggctgcaggattcgggaagatccccacgacgcgggagcgtcgcttgatctccttattgatgcgctccaatggattggtcgaccagatcttttgccagtgcgccttgggaaatgcggtgaacgccaatacttctgccctggcgtcgtccatcagcgggccgatcttgggaaacgacgcggcgaggcgatcacggaccccctcccaggtcgcgtgcaccgcctcggcgtcgggtgccgagaaaatcattcgaaacatgctggcgaccatgtcggccttgtccttgggcacgtgggcgagcagattgcgcgcgaagtgcacccgacagcgctgatgcccagcgccctggaaacagcgcttcaacgccttcaccagcccggcgtgctggtcactgatcacc

SEQ ID NO: 1674 - DNA, 401 bp, Mycobacterium tuberculosis H37Rv
acggacggcatcacggatcaagtcgacgccatcaccagtgcggaacgcgtcgagcaactcggacagggcagactgtggcaaggccatcggcgggatctccttcggtgcgtgcttggcggtacacaccgacgatctcgccgacggcccctacctcatcggagccactccgcaacaacccctaaacccaccacgctgcgggacgcttaccggcggcgtggcacaacgttcggtatcgctgatcggcatcaggaggttagtgcgatcagaagtcgtaagtgggctcggcgtcgaggatccccttgaacatcgcgaccaggcccgtgagatcagagttggcgcgcgccacgtgacaagcgccgtgcaactcttccaggtcggtcttcccccagtcgaggccagaa

SEQ ID NO: 1675 - DNA, 401 bp, Mycobacterium tuberculosis H37Rv
gcccccgtcgtggcggtggccaccgcgctgggtgccaccgccaccgccatcatcggctacctgcagtctgaacgggtgttacggccggtggccgtcgcggcgctgcgcagcggtgtgccggaaaacgtcaacgcacccggcgtcatactgcgactgatgctggcgtggattccgtccaccggcgtaccactcctggcgatcgtgctggccgtagcggcggacaagattgccttgctgcacgccacaccagaggcgctgttcaatcccatcctgatgatggcactggccgcgctgggcatcggatccgtcagcaccctgttggtggccatgtcgatcgccgacccgttacgccagttgcgctgggcgctaagcgaggtgcagcgcggcaactacaacgccca

SEQ ID NO: 1676 - DNA, 401 bp, Mycobacterium tuberculosis H37Rv
gctcggagatccgcatcgtcgccgaactaggtccgactgcccggctcctcagcggaccccagcgggaccgcatcgtcgccgagctaggtccgactgcccggctcctcagcggaccccagcgggaccgcatcgtcgccgagctaggtccgaggccactgtacccatgcctcggccccgtctgggggttcccccacgttctccaccaggcgcgataacctgcgtcgcccgctaatccgcagcgctggtcgggtcccccgggtaccgatcagggtgggcgcaatcccgaccctcatcagcgccgacgccagcggagaatgggtgtccggcgcgtgtggatccaggcccagcaaatagcggtcggcctccgggctgcctgccgccagagtccaagccctcagctc

SEQ ID NO: 1677 - DNA, 401 bp, Mycobacterium tuberculosis H37Rv
cgccgagctgccaccgcaggccggccggccgcgcggttggccggagtgggccgagcccgacgtggtggatgcgtttgccgaccgcggcatcagctcgccgtggtcacaccaggctgaggccgccgagttggcgtacgccggccgccacgtggtgataggcaccggcccggcgtctggaaagtcgttggcctatcaacttctcgtgctcaacgcgctggcaaccgactcccgggcgcgtgcgctgtatctgtcgccgacgaaggcgctcggccacgaccagttgcgcgccgcacatgcgctggcggccgcggtgccacggctggctgacgtcgcgccgacggcctatgacggcgacagtcccgacgaggtgcgccgctttgcccgcgagcgctcccggtggc

SEQ ID NO: 1678 - DNA, 401 bp, Mycobacterium tuberculosis H37Rv
cacgccgaggatcccggctatgccacgttcgcgcgagaggtcaccgacatcgcggtcaccggcaccggcgagcggttggtcttcgggcccgttgctttgggtttggtgccggtgactgtcaccaatcacgtcgtcggctacctgcgccgccagctgtccggggaggtgctggacttcgtggagctggacatgccggaacacaccttgcccacaaccgcggtcatgtacacaatcacttcggatgcattggtccgcagcggtattgaggccacacggattcccgggtcgttgcacgccgccgaacacgcggccatcgggctgctgccgctggtggccagctgcgaccgcggcgatatcggcggcatgtccacagcgaccgggcccgaggggctgcccagtgt

SEQ ID NO: 1679 - DNA, 401 bp, Mycobacterium tuberculosis H37Rv
ccgtcccggtgcacctggaccagcgccgcacgcggggcgatgctgcgggcgacgtcggtcgccgagcgtacgtcaccgcgcgcggccaatcgagcggcctcgcgggccgcgtcgatacagcgcacctgcattgataccgcggtgacgcccgccaggcacagcaccagcaccagcaccagggtggcgatcgccaacgccgcttccacggtgctcgcacccgcacacgacgctaaaccttggtgctgagcgcgcgaccgatgatgcggttgagcgccgacacaatggaatccccggtgacgaccgtgtagaggatcgcaccgaaggcagccgccgcgatggtaccgatggcgtattccacggtggacatgcccgactcgtcgaccgccagcgccgtcatccgc

SEQ ID NO: 1680 - DNA, 401 bp, Mycobacterium tuberculosis H37Rv
cgttgggcggcacgcatcaaactggctatcgccaagccgtgatcactgcccagttgccagcagaccgcgagccgctcccagtacgcgggcagcgccgaggatcgggccgcagcgagcaggccagccgtgacgtcggcacccaatcgtgcccgcgccgcgaccgcgcgcaaggcaacggcaaccgggccgccggtctcgtcggccgcgatgctgaatgcgcggactggatgggcgcccgcgcgcagttcacccaccaccagctcaagcgcggcctccagcgcctgcccctcgcggctgcggcgcaggtagcggcgacgccggcggtagcgcaggccgagtgttgcgcccagcaccgcgacagccacaacggtcggtaacggtagcaaggctgccacaccaac

SEQ ID NO: 1681 - DNA, 401 bp, Mycobacterium tuberculosis H37Rv
gttcaccctcctgctcgggcatcctcagcacgtgctgggccccgacggttatggcagccgcccaggtcgccgtcgcggcttcggttccggtcaacacgctgacgtgggtgcgccggggtagcgcgagccgcccacaccggtccgccgccgcgtggtcgagcaccacagccgccgccgccgaccacgtctttctgctcaccggatggcggccgccgagatgaacaacgcgaaccccgacggctgcggcgactcggtccagctcgtcgcgcaaccccggatcggtcagcatcgccaacacgcccgagcccaccgggtggctaccagacgggccaccagggcctgagaagactgtcacccacccaccgtgcggggtccatggtgtgggacaccagtcccaaagg

SEQ ID NO: 1682 - DNA, 401 bp, Mycobacterium tuberculosis H37Rv
acttctcgacaacatcggtagtcaattgacctgttcgggaacaaggtcgccggccggtccaactgccgacctatgctgggtcggtgaccgtctccgactcgcccgcccagcggcaaaccccaccgcaaacaccgggaggcaccgctccgcgagcccgcaccgcggcctttttcgacctggacaagaccatcattgccaagtccagcacactggcgttcagcaaacctttcttcgctcagggactgctcaaccgccgcgccgtgctgaagtccagctacgcgcagttcatctttctgctgtccggtgctgaccatgaccagatggaccggatgcgcacccacctgaccaacatgtgcgccggttgggacgtagcccaggtgcggtcgatagtcaacgaaacc

SEQ ID NO: 1683 - DNA, 401 bp, Mycobacterium tuberculosis H37Rv
gaccaccggacccgcgccgccttccagcgcctgccccacccgaagcgctcccgcgaacaccggatcgctgagcgccggcttgcccgaggtgggcgcccccgcgtcgtgcagccgcgcaggaccaccgtcgagcaccgaggaggcccgcgccgcccgcaacgaggcctcggcggcggccaccggccagccccgcaggttggcccggtgccggtgcacgcggctcagcgcgtcgcgcacccggtcgctggccgcagcaacgcccgggagctccattagcggagccagcgggtcgaccgtcacaggttgccaacctttcggggagctgagggggcaccgggaatggcctgaagcaactggcgggtgtactcgtggcggggccggctgaacacctcctcggtaga

SEQ ID NO: 1684 - DNA, 401 bp, Mycobacterium tuberculosis H37Rv
atccgacgacactgatgtaatcccagagcggcacaactggcatgtcgtgaaacaggattcgctgcgcgtcgttgaccagctcgtgggattcggttaacgtgggggcggcttcggcggcggccagcgccgcgtcgaattccgggttgatgtagccgacgtcgttggatccggcgccggcggtgaacagcggagcgagaaactcgatcatcgacgggtagtcgccccgccatccagcgcgaaatgcactgtcgatggcgcggttggtgatctgggtgcgaaatccggcgaaggtgggctgcggcgcggccaccgcatcgatgcccaacacgttcttgatgctgttggccaccgcgtccacccaatcccgatggccagcgtcagcgttataggcgatcgcgtac

SEQ ID NO: 1685 - DNA, 401 bp, Mycobacterium tuberculosis H37Rv
agagcggcacaactggcatgtcgtgaaacaggattcgctgcgcgtcgttgaccagctcgtgggattcggttaacgtgggggcggcttcggcggcggccagcgccgcgtcgaattccgggttgatgtagccgacgtcgttggatccggcgccggcggtgaacagcggagcgagaaactcgatcatcgacgggtagtcgccccgccatccagcgcgaaatgcactgtcgatggcgcggttggtgatctgggtgcgaaatccggcgaaggtgggctgcggcgcggccaccgcatcgatgcccaacacgttcttgatgctgttggccaccgcgtccacccaatcccgatggccagcgtcagcgttataggcgatcgcgtaccggccgctccacggtgagatcgca

SEQ ID NO: 1686 - DNA, 401 bp, Mycobacterium tuberculosis H37Rv
cataggacatcaggccggcgaacaaccgatcgatgatgcgcccaccgttgctgtcgttggtgccggtcgggatcagcgggttgggcggttccccgccgttgaccagcaccacgtcagggctcaggacaccgccgccacaaccggccactggcgcaagcaccagcaatccggtggcaagggctgccagggccgcccgcatctgacgcaccatgacagcgaccctaaagccttcttgtgcagtccggctccccagccggtgaagtgcggcctggccagcgcagccgacacactcgccggtgaccgttagctaccacgccacccagagtgccggcgaaccggtgggacgatgttttgggaacgctcacaccgtcgttcgcgatccggtgttggctacccaccgc

SEQ ID NO: 1687 - DNA, 401 bp, Mycobacterium tuberculosis H37Rv
cgcggttaggctcacatccgtgagtgagtccacccccgaagtctcctcgtcatacccgccgccagcgcacttcgccgagcacgcgaacgcccgcgccgagctttaccgcgaggccgaggaagaccggctggctttttgggccaagcaggccaaccgactgtcctggacgacgccgttcaccgaggtgttggactggtcgggggcgccgttcgccaagtggttcgtgggcggcgagctcaacgtcgcctacaactgtgtggatcgtcacgtcgaggccggccatggagatcgggtcgccatccactgggaaggcgagccggtcggcgaccggcgcacgctgacctattccgatctgcttgccgaggtatccaaagccgcgaacgcgctcaccgacctcggtc

SEQ ID NO: 1688 - DNA, 401 bp, Mycobacterium tuberculosis H37Rv
tatccattgccggcgcaggacatttcagtcacgaagaggcgccggaggaagtcaaccgacatctgatgcgtttcctcgagcaggtgcaccagctcagctgacgcaggccccggtgccgaccggttgggtagcaccgattttggcaagctgccccgccacctcgccggccgtcagcacaaacccagtttcggcgtcgtcgatggctgcgccgaacaccacaccgagcacctgaccgttgaggtcgatcaggggcccacccgaatcaccttgctccacatcggctctgatggtgtacacgtcgcgggtaaccggctccgggtccccgtaaatatcggggccactgagtctgatggcctcgcgaatcctggcgggtgtggcagtgaaattgccgccgccgggat

SEQ ID NO: 1689 - DNA, 401 bp, Mycobacterium tuberculosis H37Rv
acgagatcctggccagggcaggaatcttccaaggcgtggagcccagcgcaatcgccgcactgacgaaacagctgcagcccgtcgacttcccccgtggacacacggtcttcgcggaaggggagccgggcgatcggctgtacatcatcatctcggggaaggtcaagatcggtcgccgggcaccagacggccgagaaaacctgttaaccatcatgggcccgtcggacatgttcggcgagttgtcgatcttcgacccgggtccgcgcacgtccagcgcgaccacgatcaccgaggtgcgggcggtgtcgatggaccgcgacgcgctgcggtcatggatcgccgatcgtcccgaaatctccgaacagctgctgcgggtgctggcccgccggctgcgccgcaccaac

SEQ ID NO: 1690 - DNA, 401 bp, Mycobacterium tuberculosis H37Rv
ggcacccaggaaggtggcgcattgcgggtcacccacgacctgacacaggaagaaatcgcccagctggtcggggcctcacgcgagacggtgaacaaggcactggctgatttcgctcaccgcggctggatccgccttgagggcaagagtgtgctgatctctgactccgaaagactggcccgccgagcgaggtaagcgcgcgccgcgcgggcgcaaccgagcgagctagcttcctcacgcccagcagacacagagtcgcacgcaaacgacggattttgtgcgattgtgcggctgctcgcgctaccgagtccgcagatagtccagttgtgcctgcaccgaccattcggccgcattccaaagcttttcgtcaacgtcgaggtagacgtgttcgacgacctcgcgga

SEQ ID NO: 1691 - DNA, 401 bp, Mycobacterium tuberculosis H37Rv
ttggcaatcgacatcgaggccgccttcctggaatacctcgacatgttttacaacctcggtatcgcaggccgggccatgcgccgtatcggcgcggtcgagttcgcgacgacgatcgcgcccggtctgcgcgacgtgctgctcaccggcaagatcaaggagacggtggtgcgcctcgacaagaacaagctgccggtctatgatgcaatcgtcgtcgatgcgcctccgaccgggcgcatcgcgcgcttcctggatgtcaccaaggcggtgtccgatctggccaagggcggaccggtgcatgcgcaaagcgaaggcgtggtgaagttactgcactccaaccagaccgccatccatttggtcactctgttagaagcgctgccggtgcaggagacactggaagccat

SEQ ID NO: 1692 - DNA, 401 bp, Mycobacterium tuberculosis H37Rv
cagccaaacgggagatccggctgctgtcccggttcaccggagccaaccccaccgtgccggtcgttggggtaccgtcgctcccgtttgacgtctctgacctggaagcgctgcgggcgctcgccgaccagctcaccacggtcggcaacgatgcgggccgcgcagcgggccgctgaggaaccggcccatcagtgacggtcggcaacgatgcgggccgcgcagcgggccgctgaggaaccggcccatcagtgacggtcggcgacgatgcgggccgtacaacatctgaccgggatccggctattgggcacaagccagttcctattgggcacaagccaattagaaatgaatggcttttgctgtaaccaaaccgtaatcagaagcgacgggaccgcggcacctatccg

SEQ ID NO: 1693 - DNA, 401 bp, Mycobacterium tuberculosis H37Rv
tcttccgcgtctacgctgcgtaccacgttctgtgcagccgtgaggttagtccttcgagcggctggacgggttcctgacacgagctgatcccttcctcccggccgccgtgtgcgaccgccctcctcggaaacagccgatgctgcgagcgacgccacaccatgcacatcggtgttacctgtatctcactgatctgtataagtcaggtggtcgtgtgccaattgcgcaacagtacgataacgcttttttgggacgagcgtgccgtcttgtctggatcggccgggggaaatgccgccgcttcggtcccgtttacggggtctgaccagtgacgcagccgcaaatatcgcgcccgccccgatcccgcagtgactcacccgcccgcggaaagattctattggaccgag

SEQ ID NO: 1694 - DNA, 401 bp, Mycobacterium tuberculosis H37Rv
ctcggggtcgtcgaccccgaatatgaccttgacgatcacatccagcatcagcgaccgcgccaccgtcaacatcgcaaacggacggtcaaccggccatgtatgcatcgccgcgcgagtggagttctcgataatcggaacgtaacgatccagcgcagcgccatgtaatggcggcgtcaagagttttcgacgtcgaagatgctccggctcctcctggacaaacatcgaccccgacccatagatcgccgctgccggccccaccccctcgcccccgagcaggacgtcggtgggagcggtgaaaacctccttggccagcgccgagtcggacacgatcgcaacgtcacccaggctgagaatgggcatcgtcatgatcggtccgtaccgacggatcagtcgcagcatcc

SEQ ID NO: 1695 - DNA, 401 bp, Mycobacterium tuberculosis H37Rv
ggtcttgtccagacccatcagatgaatcggccttctggttaccgaaccccgtgcaaccaccccgaacttgacggattggcctatcttttcggatgttgccgccaaaatcttcagccccaccgaccccagaaactccaccgcggaaaggtcgatgactagcgccgtcggattgtcggccacaacttcgccgatggcctcttcaagtgccgcagcggtgatcaaatcaatctcaccaccgatgctgagcacggcgaccccgttatggtcggcaaccgtgacggtgatcgagtcgggagctgacaatggcgatcctcttgtccgagccgtccgtgtggtgaaagcctagcccgcctgcgaactgcggcggcggcccatcagcgtaggatttgccggctgcacac

SEQ ID NO: 1696 - DNA, 401 bp, Mycobacterium tuberculosis H37Rv
cgcccgtggcgccgggatatgcgccggccggatatccgccctaccccgctacaccacccgggtacggcccgccgggttatggtgcgccgcccagctatggccccccgcctggctatggtccacccctcggctaccccgccgcaccgcccggctgcggcccaccgcccggctatggcccaccgctcggctatggcccaccggtcgccccgggcgcggtcaaaccaggaataatcccgctgcggccgttgaccttgagcgatatcttcaacggcgcggtcggctacatccgcgctaacccgaaggcgacgctgggattgaccgccatggtcgtggtgaccctgcaaatcatctcactggtggccctatttggccccatgaccgccttcggtgacatcgtgacc

SEQ ID NO: 1697 - DNA, 401 bp, Mycobacterium tuberculosis H37Rv
ctggccaagctgcgggagatcgacgggctgttacccacgttgatacgcggccaaggcaccgaattcgattcgctgcgcgagtatgtcgtcggcgacgacgtccgctcgatcgattggcgcgcgagcgcacgccgcgccgatgtcatggtccgcacctggcggcccgaacgggaccgccgagtcgtcatcgtgctcgacaccggacgcatggcggcggggcgggtcggtgtcgacccgaccgccgccgatcccgccgggtggccgcggctggactggtccatggatgccgcactgctgttggcggcactggcgtcacgagccggcgaccatgtcgacttcctggcccacgaccggatcagccgcgccggcgtgtttggcgcctcgcgtagcgaactgcttgc

SEQ ID NO: 1698 - DNA, 401 bp, Mycobacterium tuberculosis H37Rv
tgctcggcgaggacctgtccgcgcgggcggttgcctgcagatatcaccgaccaccccagccgcatcccaatcgccgcggcgagaaagacggccgtcagctccagcagcccgtgcggaagaagcaggcccagcaggaaatcgcccttccccgcctggaacatcagcccggcgatcagtccgacgttggcggcgttatcgaagagcaccagcggtatcggcagccccagcacaacagacatcgcgatgcacgtggtagccacccaggagttgttcacccagacctgcagagcgaacgacgcggccgggtgctcgctgtaataggactggacgtcatggctgaccaattcgtctatctcagtgggcgtcccgatcgcggactgcacctcgtgactgccggccac

SEQ ID NO: 1699 - DNA, 401 bp, Mycobacterium tuberculosis H37Rv
gacatgttcaggcgcacagcgaaagctaggacacgtcaacccaatccagggtccgctgcaccgccttgcgccagccggcataacccgcggcacgctcgtcgtcgtcccacgtcggtgtccaccgcttgtcctctcgccagttggcccgcagatcggacggagccgcccagaacccgaccgccaagcccgccgcgtaggccacacctagtgcggtggtctcggcgaccaccggccgcaccacatccacacccaacacgtcggcctggatctgcatacacaggtcgttgccggtgatcccgccatccaccttcaacacctgcaggcgaacaccggagtctgcttccatggcgtccaccacatcgcggctctggtagcagatcgcctccagcgttgcgcgcgcc

SEQ ID NO: 1700 - DNA, 401 bp, Mycobacterium tuberculosis H37Rv
cggtcaccgcgatcgaaccttcaagcgcgtacacgggtttagcgttcccgaattggtagcacaccgtggttagcaggccgttattcgatcgcacgatcgtttcaccggtgttcagcagcagaaaattgccggtcccataggtgtttttcgcctcccctggggccagacagacttgaccgaccatggccgcatgctgatcaccgagaactccggtgatcggcacctcaccgccgacaggcccggtcgccagcgtgacaccgtaaggctccgacggcgccgacgatgcgatctcgggcagcatggcccgaggtatcgaaaacaacgacaacagctcgtcgtcccagtccagcgtctctagatccatcaacatggtccggctggcgttggttacatcggtgaca

SEQ ID NO: 1701 - DNA, 401 bp, Mycobacterium tuberculosis H37Rv
gaccgggtcggctactcgccgatagacgggccagaatccgttggcctcgccgacctgccgcacgtgcggtcgtgaggtgaattgctcgatgttttcgacggcgacctcaggcgccagcggcgcacccaacaacgtcggatgggtgacaacccgtagataacccagcgcgacgggccacaatagatataccagccctggcccagccaggaatcgctcaacgagcgtcttcgccttatcgtgaaacgggctggctcggtgcgtcgcatggaccagaacatcgacgtcaaaggtttcgctcacccacggtccaaaatcgcccaaacagcgtccttgtcgtcaagatccacacggggccgcaagtcggcagtcgaccagcggatgtcaacgtttggaggaggctc

SEQ ID NO: 1702 - DNA, 401 bp, Mycobacterium tuberculosis H37Rv
gcaagtcggcagtcgaccagcggatgtcaacgtttggaggaggctcggccgccagagcttgcgcaagcaattcggaggcgagctgccctaacgttttgcgctcctcgcgctggcgtcgtttcaacgcccgcagtatgtcgtcatcgaggtcgatcgtagtgcgcatacatcagatgctaactcgatatgcatctgatgcgaacgatctcacccttcttgcgctgccggcacgaaacctgttgcatcagcaatgtgggcgaagaggtaacgcgcaccacatatagccgcgaacatcagcgcgagtaccggcgcaaggtgcggctgtgcttggacgtcttcgagaccatgcttgcgcagaccaggttcgaggccgaccggccactcaccggcatggagatcga

SEQ ID NO: 1703 - DNA, 401 bp, Mycobacterium tuberculosis H37Rv
ctgatgcgaacgatctcacccttcttgcgctgccggcacgaaacctgttgcatcagcaatgtgggcgaagaggtaacgcgcaccacatatagccgcgaacatcagcgcgagtaccggcgcaaggtgcggctgtgcttggacgtcttcgagaccatgcttgcgcagaccaggttcgaggccgaccggccactcaccggcatggagatcgaatgcaacctcgtcgacgccgactaccagccggccatgtcgaaccgctatgtgctggatgccatcgccgacccggcgtaccagaccgaattaggcgcttacaacatcgaattcaatgttccgcctcgcccgctaccgggacgcacttgcctagagctggaggacgaagtccgcgccagcctcaacgatgccga

SEQ ID NO: 1704 - DNA, 401 bp, Mycobacterium tuberculosis H37Rv
gcgttatgcggctctcaacgagtcgattttcaaggcccgcggcgaggatatccccatcaacatcgccggcccggaaccgctgagctgccatgccggatccatcgcacccgaatccgcttgcaccagtgtgcaattacatttgcagctagcaccggcggattttccggctaactggaatgcggctcaggtactggccggaccgcagttagcactaggtgccaactcgccctatttcttcggccaccagctgtggtcggaaacccgcatcgagctgttcacacagtccactgatgcccgtcccgaggagctgaaatcgcgaggggtgcgcccccgggtatggtttggcgaacgctggatcacctccgtcctcgacttgtttcaggaaaacatccgctacttcc

SEQ ID NO: 1705 - DNA, 401 bp, Mycobacterium tuberculosis H37Rv
ccgcagaccctgcggcgggtccagcaccaacgaagaaaccgcgacctgtgccccgagccaccccaggtgacgacacatcagatgtcccacgccaaccggacaccggcaaagatctggcggcgatacgggtgatcccagttgcggaagctgggccgcaggatggccggctccaccgcccacgagccgccgcgtagcacgcgatagtcgccgccgaagaacggctgtgagtaccgctcatagaccatcgggacgaaccccggccagggccgcaacggcgaggtggtccactcccagacatcgcccagcatctgctcggccccgcacgccgatgccccggccgggtaggcacccaccggcgcggggcgcagcgtttgaccgcccaggttggcataggtgtctgt

SEQ ID NO: 1706 - DNA, 401 bp, Mycobacterium tuberculosis H37Rv
gcgccgcatgttcgacctgctggtccggatgggctacaaggagattgaggtggggttcccctcggccagccagaccgacttcgacttcgtcagagagatcatcgagcagggcgccattcccgacgacgtcaccatccaggtgctcacccaatgccgtcccgagctgatcgagcgcaccttccaggcgtgttcgggcgcaccccgggccatcgtgcacttctacaactcgacgtcaatcctgcagcgccgcgtggtctttcgcgccaaccgggctgaggtgcaggccatcgcgacagatggggcgcgcaagtgcgtcgagcaggccgccaaatacccgggcacgcagtggcgattcgagtactccccggagtcctacaccggcaccgaactggaatacgcca

SEQ ID NO: 1707 - DNA, 401 bp, Mycobacterium tuberculosis H37Rv
gctgatcggatcgagggctgcctgttcggcaacggcgagcgcaccggcaacgtgtgcctggtcacgctgggactcaacctgttctcccgaggtgtggacccgcagatcgacttctccaatattgacgagatccggcgcacggtggagtactgcaaccagctgccggtgcacgaacgtcacccctatggcggcgacctggtgtacaccgcgttctccggtagccaccaggacgccatcaacaagggcctagacgcgatgaagctggatgcggatgccgccgactgtgacgtcgacgacatgctgtggcaggtgccgtatctgcccatcgacccgcgcgatgtcgggcgcacctacgaggcggtgatccgggtcaactcgcagtccggcaagggcggcgtggc

SEQ ID NO: 1708 - DNA, 401 bp, Mycobacterium tuberculosis H37Rv
gcgggcggccctggacataccggcccgggttgaggtaggggcaggccatccgggctgccacggccttcagcggtcgcagctcgtcgtgagtcacccggccgttgggccaccggcgccgtgtcaccgggtgcaccggcagccagacgtcgagttcgcgcgcactctctagggcagctgccagtatcccggtcaatacccggacgtcgtcgaatgcatcgtgcggccgttgctggggcacaccccaatgcgcggcaagtgtctccagccgcagattgtcgacgccaagctgcagccggcgggccagctcgaccgtgcacatgacgaagtcaaccgggagttcggcctcggcgatctcggcctccgcagcgagaaacgcatagtcgaacgcgacattgtgcgcg

SEQ ID NO: 1709 - DNA, 401 bp, Mycobacterium tuberculosis H37Rv
gccgcagattgtcgacgccaagctgcagccggcgggccagctcgaccgtgcacatgacgaagtcaaccgggagttcggcctcggcgatctcggcctccgcagcgagaaacgcatagtcgaacgcgacattgtgcgcgaccagagtgcgcccgcgcagcacgtcgacaacctcaccggcgatatcggcgaactgtggctggccatcgagcatggcggcggtcaggccgtgcacgtgggtggggcccgggtccaccttgggatttagcaggctgaccacggattgctctagtcggccggcggcgtccaggccgagcaccgcaaggctgatgatccgggcctggcccggccgaaagcccgaggtctcgacgtcgatgacggcccaaccccgatcctggtggctg

SEQ ID NO: 1710 - DNA, 401 bp, Mycobacterium tuberculosis H37Rv
gagaccagctggaccgggtcggcgagatcaacgtcatcgaacgcacactgcgggccgggctggcccggcaccccgacgctgtcgtggtcgccaactgcgacgacgtgctgatgacctcggccgcctacgacagccccaacgtcgtttgggtggctgccggcggcgcgtggtcaaacgattcggtcagctgcccgcgcagcggcgaggtcatcgttcgcaaggccccctctcaggaagaccactggtactccaccggcgccgacttcaagcggcccgccccgcactggtggttcgacgacgccacgctgtatgggcccgacgggctggcgctgccgatgcggctggcactgccaggctcggtgaatcgcggcaacgccgcccaagccgtggccgccgcagtc

SEQ ID NO: 1711 - DNA, 401 bp, Mycobacterium tuberculosis H37Rv; identical to SEQ ID NO: 1710

SEQ ID NO: 1712 - DNA, 401 bp, Mycobacterium tuberculosis H37Rv
aggtcgtcgccaactacaccgcgttcctgcagctgcaacgagcattggcgcgtcgtggctgattctgtggtgcggatcgggctcgtgctgcccgacgtgatgggcacctacggcgacggcggcaacgccgtggtgctacgacagcggctgctgctgcgcggcatcgccgccgagatcgtcgagatcacgctggccgatccagtgccggattcgctggacctctacacgctgggcggagcggaggactacgcgcagcggctggccacccggcacctacgtcgatatccgggcctgcaacgcgcggcgggccggggtgctccagtattggcgatctgcgcggccatccaggtgcttgggcactggtacgagacgtcgtcgggagaccgggtcgacggcgtggg

SEQ ID NO: 1713 - DNA, 401 bp, Mycobacterium tuberculosis H37Rv
gctcccggcgaactcggcctggcccgcgcttatgtgtcgggtgacctacaggcacacggagtacatcccggcgatccgtacgaactgctcaaaacgctgaccgaaagggtcgacttcaaacggccgtcggcgcgggtgctggctaatgtggtgcgctcgatcggcgttgagcacatactgcccatcgcgccgccaccccaggaggcgcgaccccggtggcgtcgaatggctaatggcttgctgcacagcaagacccgtgacgccgaggctatccatcaccactacgacgtctccaacaacttctacgagtgggtgctcgggccatcgatgacctacacgtgcgcggtgtttccgaacgctgaggcttcgctggagcaggcccaagagaacaaataccgact

SEQ ID NO: 1714 - DNA, 401 bp, Mycobacterium tuberculosis H37Rv
ttggcagcgtcggaggactgttcgtcgacgcactgcgtttcccaggttggcgccaagtcactcggggtctacgccgttaactaccccgccagtaacgactttgccagcagcgacttccctaagacggtcatcgacggaattcgcgacgcgggctctcatatccagtcaatggcgatgagctgtccccagaccaggcaagtgctcggtggatactcccaaggtgcggccgtggccggttatgtcacctcggctgtggtaccgccggctgtacccgtgcaggcggtaccggcaccgatggccccggaggtagcaaaccacgtcgccgcggtcactctgttcggcgcaccgtcggctcaattcctgggccagtacggcgcgccgccgatagccatcggtcccct

SEQ ID NO: 1715 - DNA, 401 bp, Mycobacterium tuberculosis H37Rv
actgcgggaggtcatcggattccggtgcccgagctcgcgaaaattctgggcgggtcgccggcaccacgatgctggccgtcccggtgcccgattccgcgctgcgtgtcgcgggatcggtgctggatcaagccgggccctatctgcctttcaatactccgttcaccgcggcaggtatgcagtactacacacagatgccggagtccgacgattcgccgagcgaaaaagaactaggcatcacctaccgcgatccgcgcgacaccgtggccgacaccgtcacggccctgcgcggcctgggcagctaactgccgtcgggaggttccgccggttccgcgtcggggcgcgaattcttcaaccactgcttcagccggagcagttcgttgacgacgatgccgacgcccagg

SEQ ID NO: 1716 - DNA, 401 bp, Mycobacterium tuberculosis H37Rv
aagtcgcgcggggtacacacggtgatcgcaagcgacttttcacccggccgtcgtgccctcgcaaccgcctgtggcgctgattccgtagtcgatcccgtacaggactcaccgtatgcggtagccgccggccttggacagggaaacagacacctgcaaagcatcctcgacgcgttcgacctcgcagtcggcacggtcgaaagactgcagcggctgcggctgccgtggtggcacctttggcgggctgccgaagcagctggcgccgcaacgccaaagcgtccagtcatcttcgaatgtgttggcgttccgggaattatcgatggcatcatcgccagcgcaccgctgttctcgcgcgtcgtcgtggtcggcgtctgcatgggctcagaccacatccggccggcgat

SEQ ID NO: 1717 - DNA, 401 bp, Mycobacterium tuberculosis H37Rv
gattggctgccgccatgatcctggccgaagccggggtgcgagtcacattgtgcgaagctgcatccgaagctgggggcaaggccaagagtttacgtctcgcggacggccacccgaccgagcacagtttgcgggtttacaccgatacttaccaaaccctgctgacgctgttctcgcgtatacccaccgaacatgacaggaccgtgctagacaacctggtcggcgtcagcatggtttcggctaccgcgcaaggcgtgattggccgaatcgctgcgccagttgccttgcaacgccggcggccaaccttcgcgcggatcataggcaaggtagtcgaaccgccgcggcaacttgtccggatcttgttgcgcggcccaatggtaatcgttggtctggcccaacgaggt

SEQ ID NO: 1718 - DNA, 401 bp, Mycobacterium tuberculosis H37Rv
tgcagggaatcggggtgggcgctaccttcccgctgctcggcagtgccgccttggcccggctggccaagggcggcagctacgccaccgcttcggcggtgaccggcaccatccgccaggttggcgccgtcatcggcgtcgcggtgctggtgatcctggtcggcacaccggcaccgggcgcagccgaagaggcgttgcgtcacgggtgggcgttggccgcgatctgtttcgtggcggtggggatcggggcgctgtcgctgggtcgcatccgcccagtcccagctgcggttgaacccccgccggggccgccggtggctccgttgggagcgcggcggccgccgagacccgcaccggtggcctcacccgccgcggcagtggccccgacccccaagacttcccgcgaa

SEQ ID NO: 1719 - DNA, 401 bp, Mycobacterium tuberculosis H37Rv
actgcccgatctgtttcgccgactctggccaccaacccgacggctacgccatcaccgcggcgcagtgtgaacggatgctcgacacgctcgttgccgccgagggtgaacccgaagtggtgatgttctccggtggcgaaccgaccatccacaaacaactcctcgagttcgtcgacgccgcccaggcccgcccggtcaagaccgtcatcatcaacaccaacggcatccggctggcctccgaccggcgattcgtcgaccagctcgccacccgcaaccgtcccggccaccccgtgcacatctacctgcagttcgacggcctggacgaggcaacacatcgtcgaatccggggccacgatctgcgggacgtaaagcagcgggccctggacaactgcgccgcggcgggc

SEQ ID NO: 1720 - DNA, 401 bp, Mycobacterium tuberculosis H37Rv
acctgcagttcgacggcctggacgaggcaacacatcgtcgaatccggggccacgatctgcgggacgtaaagcagcgggccctggacaactgcgccgcggcgggcctgaccgtcagcctggtggccgcggtggaacgcggcctcaacgagcacgagctcggcgcggtcatccgccacggcatggcgcagcccggagtgcaaccggtggtatttcagccggtcacccacgccggccggcatgtgcagttcgacccgctgacccgactgaccaactccgacatcatcgcctgcatcaccgcgcaactgcccgaatggttcaggcccggtgacttctttccggtgccatgctgcttccccagctgccgatcgatcacctacctgctcaccgacggggagcatgtg

SEQ ID NO: 1721 - DNA, 401 bp, Mycobacterium tuberculosis H37Rv
gcatctgaggagcgagccgcaccgcgttacttcgacgtgtttccccccttcaagtcggtatcccggctcggctgcacccgcttgggttcgcccggcatcttcggatagttcggcggatacggcatgtcaccgagcccgcgctcctcgtcggcggcggccaagtccagcaatggtgcaatcgactgggccacgtcgtccatgccggcccaggggtcgtcgcggatcttcaccagctcgggcaccgtggtcatggtgtagtcgtcgggatccgcgccggccagctcttcccaggtcaacggcatcgataccgtcgcgatcggggtaggacgcaccgaataggccgacgccatggtgcggtcgcgggcgttttggttgaagtcgatgaagatacgcgcgccccg

SEQ ID NO: 1722 - DNA, 401 bp, Mycobacterium tuberculosis H37Rv
gtcaccgcatccggtgcgcggcgctcgacttcccgggccaacgcaatgcccgcccgacgcacctcgacgaagtcccagtcggtggcgatgcgcaggaatacgtgaatccctctacccccggatgtcttcggataaccgaccagaccgaggtcgtccagcacggaccggagcacatcgacggcgaccgtacgcgcctccacgaagccggtgcccggttgcggatctagatcgatgcgcaattcgtcggggtgctcggtgtcggggcagcgcacttgccacgggtgcagggtgattgtgcccatctgcgccgcccatacgatcgccgccgggtgggtcaccttcagcgcgtcagccatccgccccgacggaaacgtcacccggcacgtctgcaggtagtcagg

SEQ ID NO: 1723 - DNA, 401 bp, Mycobacterium tuberculosis H37Rv
ctgcagacttggttgtctgacaacggctatgcgattcgaccggcggtgtcagcggcgctggatccctacgtgcgtgacggatgggcgttcgtggcgatccggctgaccagcaccgacctgatagtgggcgggctcgatccggtgcggatgaccttccgatcgtcgcggttggtgtatcccatgcggctatcggtcgccgcccaggagccgcaacatgtcaccatcttcaccctgtccgatcaccggcagcagcgcaccgacgccgacgctgccacacagacaacccacgtccggttcgcgggcgacatgtccactgcggttcgtgaccctctgttgcgcgagctgatcggcaaccacggctcatatctgaccaaggtcgaggtggacatctatcagacatc

SEQ ID NO: 1724 - DNA, 401 bp, Mycobacterium tuberculosis H37Rv
gtcggcaggctcccgccttggtgacggccaccgccggcatcatgccgatgctgccgggccttgcggtcttccgtgccgtgttcgcgttcgccgtcaatgacacacccgacggcggtctgacccagctgctggaagcggccgcgactgcactcgcgcttggcagcggggtggtgttgggcgagttcctcgcctcaccattgcggtacggcgccggccggatcggcgacctctttcggatcgagggtccacccgggctccggcgggcggtcggccgtgtggtgcgcctacagccggccaagagccagcagccgaccggcaccggtggccaacggtggcgaagcgtcgcgctggagccgacgacggccgacgacgtggacgccggctatcgcggcgattggccc

SEQ ID NO: 1725 - DNA, 401 bp, Mycobacterium tuberculosis H37Rv
gatcatttccacgagctacgatgctcgagttgcccagccagcaagatacgtccctttacaccaggcagataaactgggctggctttggtcaaacccagcgcgacccgcagcacttcctcatagcccgaccgcgcgctccagttccttcaacgaggtctccagatggctgagtacccgctgcacgtgtggaacgctgcggcggcaacccacgactccgaagtcgagactatcggcggtgctggtcagggtgatgttgagcgcttgtccgtcgagcaccaacgacattggatagttgccgaccatcctggcgccgttgaagtacagcggttcgcgcgcaccgggcacgttcgagatgcacacattaaacggcggtggcgttgccttggccaagcccggcaggg

SEQ ID NO: 1726 - DNA, 401 bp, Mycobacterium tuberculosis H37Rv
gagtccgcggtgcgggccgttaccagtgcttccagagcaccggaggttgcgaagatgacaatgagcagagcgccctcggcgatctgcccgatggcggccgcgccgatcgccgcgaccaccatcagcagatcgacatctagggtccttcgctgtagcgcctgtagcccggccagccctggctcccaaccgccggtcgcgtagcacgccagaaacagcgcccaccgcacccattgcggtgctccgcacagctgtgtcagtagtcccgctgaaaacaggcccaacgccagcgcggcccaacgcatctccgacaacgcgaacagcttggttcggcgcgctaggaccaacggcgacgctgaggtgcaccgggcgggagagagttcacgaacagccacccggccaac

SEQ ID NO: 1727 - DNA, 401 bp, Mycobacterium tuberculosis H37Rv
cggctgatgatcctcacccagctacggaacggcccgcttccggtaaccgacctcgccgaggctattggaatggaacagtccgccgtctcgcatcaacttcgagtgttgcggaatctcggcttggtcgtgggcgaccgggcaggccgtagcatcgtctacagcctctacgacacgcatgtggcgcagcttcttgacgaagccatttaccacagcgagcacttgcaccttggtctctccgaccggcaccccagcgcgggctaagcggtcaggctcataagctcgcgggtcactttcacccatgaccggcgagctttacagaccccagcgcctcaaggggcaccacctcaagggcgcagccaccgtggcgggcgcgcaatcgacaggtcgttgccgaccgagcg

SEQ ID NO: 1728 - DNA, 401 bp, Mycobacterium tuberculosis H37Rv
tcgaaatccaactgcgcctgccggttaacggccgttgggtgctggtggtgactggcggcaccggagcgatatcgcttccggtgctggtgagcgacatgcctgcgacgataggtttttgacgcgccggtcttgagcgacgacccccggggcttgcagaaaggttgtcccgtgcaccagcagcatccctacaacgcagctggattcggctgaccgtgctgacacccaacccagcggtaggttcggcagcgtgatagtcggggccttcctcgccgaagcggcctcggtggtggacaacaagctcaatgtctccggcggcgtgctgtaccgatttgcggtggatccggaccggtcggcccagtttctgctggtggtgttgacccaggccgagaccgatgatccgg

SEQ ID NO: 1729 - DNA, 401 bp, Mycobacterium tuberculosis H37Rv
ggtggtgttgacccaggccgagaccgatgatccggatcggcgggtcgacgtagaggtttggcctccgacgggcgacgacgcgcaccacatcgagttcgagctacccgaggccgccgtcgccgccgaggtcggattcgccatcttccggatcgaggtaaacctgcccgtcgacggccgttgggtgctggtggtaaccggcggcgccggaacgatctcgctgccgctgatcgtgacggggtgaggcgtaggcccctgccgacggagctgccagccctattgatcgaatgggagcaggacgccgaggccgaatggcgatccggacgggaacagacgccgtgccttagcggcgaactgtgggacctgctcgcccagcgcatctagcaggctgtgcggcgtgaacg

SEQ ID NO: 1730 - DNA, 401 bp, Mycobacterium tuberculosis H37Rv
ggcgcacaatgacgaaaaattcgtcgtcgacgtcgagtagcccgaagacggctcccgcgctacgcagctcacgcagttccgtctcggcagcccgcagactggtcaacgctttggggcccatcggagagcagcgccagcggccctcttcacgcacaaccgcaacaccgaaaccgtccggtgtgtccgcggccggtctttgcatggaggcccgttgtgctcccatgggcgcctacggtagtcgctgaccaggcctcctgaccagatggtgctcagacagcggagatctggtcgcccctcagggcgccgccacgggctacctatgccaaccttggactgtgactcggactgtcgcggcgccaccggtgtgcgtgcttgggctgggactcatcggcggttccatc

SEQ ID NO: 1731 - DNA, 401 bp, Mycobacterium tuberculosis H37Rv
ggtagtgcattgggtacctcgacgcgcagcagcacctgggactcggtcatgcccatcgcccgggcggcatcgaccaccagcggatcaacactggcaatgccggcgtacgtgctggccagcaaagacgggatacccaacagcatcagcgccaccagcggcggccccaatcccagcccgaatagcagcacccctagcagcagaacacccaacgtgggcaaagcgcgcaaaccattgaccgcacccaccaccagcagcgtcccgcgaccggtgtgcccgataagcagcccgactggcacggcgatcagtgctgaagcggccaccgccaccgcggtgtattccaggtgctcacacgtgcggactgccaagccgactggaccggtccagttactggcggttagcag

SEQ ID NO: 1732 - DNA, 401 bp, Mycobacterium tuberculosis H37Rv
gatcttccagcaccaccaggtggttttgcgggatagccgcagaggtgctgaagaggttggcggctgtggccgttccctccaccagtgctcgcacggtcaccgcaccgccgccgtcgttgatggtcacgaagttgcccggcgcgatgtcgagtgagtatttgtgccgcagcccgggcaacccggacggccgggtctgaaaggccgacggcgccgcgaacttcacatccgcggaatgcggggccaggtcggcgatcgttttcaggttccaccgggcggcggtagcggcggtgacggtgacggtgtcagtgtcagaggccggcgacggcgtcaggatcgacagatcgccgggaagtcgcttgtagagctccaactcaacggcatcgagcatggtcaccgtggcg

SEQ ID NO: 1733 - DNA, 401 bp, Mycobacterium tuberculosis H37Rv
ccacaaccagcccgggttaccgtcaaaccagcccatgtaacgctgatagatcgccttcacgttatggctgaccgacccgtagtagccgtgggtgtgccatgcccgctgcagcgccggtggcagctggaacatctcggcgatctccacaccggtgtagccctggttcagcagccgcagcgtctgatcgtgcagatatgaatacatgtcgcgctgttgcgacaagaactcgacgatcttctcgcgtccccacgtcggccagtggtgcgaggcgaacaccacgtcggttcggtcggcaaaggtgtcaatcgcctcggtgagatagcccgaccaggcgcgcggatcgcgcaccaaggcgccgcgcagggtcagcaggttgtgcaggttatgcgtggcgttttcgg

SEQ ID NO: 1734 - DNA, 401 bp, Mycobacterium tuberculosis H37Rv
cctcaccggtcgacagtgtctgcccgaggccgcagccgacgtgcccccggagaccgcgcgccaacacggtgccgtacatgtagcccgcacggcgcatcatcgccgagccggcgtagatgttttcctgcacggcgtgcgcggtgaacccctccggcgccagcaccgccacctttcccgcgtccacgtcggcctgggtggtgacgccgagcaccccaccgaaatgatcgacatggctgtgggtgtagatgaccgcgaccacggggcggtcggctccgcggtgggcgcgatacaagtccagcgcggcggcggccacctcggtggacaccaacgggtcgatgacgatcagcccagtgtcaccctcaacgaagctgatattggagatatcgaatccgcggacctga

SEQ ID NO: 1735 - DNA, 401 bp, Mycobacterium tuberculosis H37Rv
gcggtgtgcggctgccggcgatccgttccagctgggaccggccggttgacgtcaacgccgcccgcgaaccactgccggtcagatatccggcggcgaccgtcgtgccgtcgctgaccaccgccgccaccatcccggccggctggcccggagcatcgagaaacctcggaccggggcccgaccggatgtagttgtgcgtctcgtgccgccagggcggacggggcattttctccggatacatcaacaccgagcggtacgacgttccgccgagttggttgtcaagttgtgccaccagatgacgacgcagcgccatttcggttgccgcggtgattcccacacacaccacggcgaggacgacaacctgtccgaccaggagccgcagccgaagcgaccaaattcgcgga

SEQ ID NO: 1736 - DNA, 401 bp, Mycobacterium tuberculosis H37Rv
ctgctggcgaccgggctgctgaagcaaatcccgctgccacgcttgaggcagcgtcccggaccaacgccaattggtcgctctccgtcgccgttgtggaagtcgccgacccggacagttcgatcagacatagccaaggatcggtagcatgacgatacgcattccgatagcggggaattgaggtgccgtgacagacactttgttcgcagatgtctccgaatatcaagtgcccgtgaataactcgtatccctaccgagtgctgtcgatccgcgtctgcgacggcacctatcgggatcgtaatttcgcgcacaactaccgatggatgcgctcggcattcgacagcgggcgactcacattcggaatcgtctacacctacgcccgtccgaattggtgggccaatgcca

SEQ ID NO: 1737 - DNA, 401 bp, Mycobacterium tuberculosis H37Rv
tccgacgacaccaatgcgcgggtgcggtctctggaagagggacaggccgagatcaaggaccttctgctccgcgccctcgacaagtgattctccgaatggctgcgcgattttttgagcccggcatcgaacggtgatctgtggtcggtgaatccgcgacacgccgtggtttcgggtcgtgccggatggcgtcaaatggccagctcagaacacctttcgagaccacgattttcgagaccacgatcaggtgctgttgcaggctctcctaaagccgtagggcgtgtttgaaccgcaccatgatggggtgcgcggacatcggttggcgatacgggctcgaggttgcagatcctgtccgcgctcgtggccggcacccgagcgaccctgtcgaagaccgcgccttgatt

SEQ ID NO: 1738 - DNA, 401 bp, Mycobacterium tuberculosis H37Rv
caccgggtgaccacgaaaccagaacatcaccgggttgaaccacaggtcgtcgacgtaggaccaggtcccggcgaggatcgccgacaactccacggccagggccgtgagctgtccccagagcacctggacggtcaggccgagggcgcccgcgggctcgcccgtgagcgctcgcgccagcagccagcccatggtcaggaggggaccatcccacacggagtgggcgagcaggaacaccacggtggggagcgggagcggcgtggcccactcgatgatcggggtgttggtccaagcgctgagcccgaacaccggcagctcccagaccagaccgatgagcgtgccgagcaacagcatccgcgcgagctcgggtcgagtccttcgagcgcgcagcatgagcaccacga

SEQ ID NO: 1739 - DNA, 401 bp, Mycobacterium tuberculosis H37Rv
cgaacccaccggcgcgccagtccctaattcctaatccagcggtcgatggtatgccggctgatccgaaccttccgcccgaacgggtcggtgtgctcacgggaggccagctcgcgcaccatctttccccgctccttggtggaatgcgctgcatcggcggcctcccggatcaactgataccgaaacaatccgatcgccctcgcccgctccgcgcgcacctcgccttatcatcgccgaccgccaccggccgctcctttccgtttggtgtcccgtgaacacacgacagcgcacaggattacggcccaatcggcggttagggcagggtcgactcgtgttgcacccactcgccgggtcaccccggcgccaccagccgcccacccgataccgccaccgccgtctcggcc

SEQ ID NO: 1740 - DNA, 401 bp, Mycobacterium tuberculosis H37Rv
ctcccgagcacgtcgccgtcggttgcggctcggtcagcctctgccagcaactcgttcaggtcaccgcctcggttggtgacgaagtggtcttcggctggcgcagctttgagctctatccaccacaggtccgggtcgccggcgctatccccatccaggtgccgttgaccgaccacacgttcgacctctacgccatgctcgccacggtcaccgaccgcacccggctgatcttcgtgtgcaaccccaacaatccgacctccaccgtcgtcggtccggacgcgctggcccgcttcgtcgaggcggttccggcgcacatcctgatcgccatcgacgaggcgtatgtggagtacatccgggacggcatgcggcccgacagcttaggcctggttcgcgcacacaacaat

SEQ ID NO: 1741 - DNA, 401 bp, Mycobacterium tuberculosis H37Rv
ggcaccgccgcactatggggccggttgtttgccaccgacgccgccatgctggataagcgcctcacccagctggcccacggcgtctgcgacgacgatccccgaaccatcgcccagcggcgcgccgatgcgctgggcgcgctggccgccggcgctgatcggcttacctgcggctgcggtaattccgactgcccatccagtgccggcaaccaccggcaggcaaccggtgtggtcatccacgtcgtcgccgacgcggcagcactaggcgctgcacctgacccacgcctatccggcccggaacccgcgttggcacccgaagcacccgccaccccggcggtcaagccgccggccgcgctgatcagcggcgggggtgtggtgcccgcgccactgctggccgagctgat

SEQ ID NO: 1742 - DNA, 401 bp, Mycobacterium tuberculosis H37Rv
gatgctcaagctagcttccagacacagtcgcggacactggcccgcgtccgaggcgatctggtcgacgggttccgccgccacgagctgtggctgcacctgggctggcaggacatcaagcagcggtaccgccgctcggtgctggggccgttctggatcaccatcgccaccggaacgaccgccgtcgcgatgggcggcctgtattccaagctgtttcggctcgagctgtctgagcacctgccctacgtcacgctcgggctgatcgtctggaacctgatcaacgccgccatcctggacggcgcagaggttttcgtcgccaacgaaggtctgatcaaacagctgccggcaccgttgagcgtgcacgtctatcggttggtgtggcggcagatgatcttcttcgccca

SEQ ID NO: 1743 - DNA, 401 bp, Mycobacterium tuberculosis H37Rv
ctaatacacccgtcgccgccatcgtctgccggtaaagtgggccgaaatggcgcggaactaccagctggaaggattacctcccattcgatggtgaccgtagcacgccgaccggtgtgcccggtgacgctgacaccgggtgacccggcgctagcgtcggtgcgcgacctggtcgacgcgtggagcgcgcatgatgcgctggcagagctggtcacgatgttcggcggcgcgtttccgcagacggaccatctggaagcgcggctggcgagcctggacaagttcagcacggcatgggactaccgggcgcgcgcacgtgcagcacgagcgctccacggcgaaccggtgcggtgccaggactccggcggtggggcgcgatggctgatcccccgcctggacttgccggc

SEQ ID NO: 1744 - DNA, 401 bp, Mycobacterium tuberculosis H37Rv
atgcaggactcaacgtgtctgttggtgaccgggcaaccgttcgtgccctaccagaacttcgacgcactgcgaactctggcgctgcccttcgggatacaggtggagacagtgggcttcggcatcgaccgctacgacgggctgggtgagttggaccaacaacaccctgccaagctgctgcaggaggtccgctcgacgatccgagcggcccgagccctgctggaacggatcgaggccggcgagcgcatggctaccgatcctcggcggtgatggtgcatggcgtggccggcgggtagctgcccgatacggctcgcaaccgtcccggtggcggccacggccgtagtcccatgttggctaggtaccgcaccggattgacatgcccgtcctgcgtgcggacctcgaaa

SEQ ID NO: 1745 - DNA, 401 bp, Mycobacterium tuberculosis H37Rv
accacgttcgtcaccgcaggatggttcgccaggatctcggcggtgtcatcggtgctgcggtcgtcgatcacgtagatgtcgtcgctgaacacggccaacgagtccaacgttgcggctagtgtccgcccggcgttgtgcgcacgcgtcatcgccagaatccgcatgccgcctctctatcaccccagaacacaggtccagtagttgggtctgtccgccaatccagcgggaagggcgggcgccgcgggcagatcgtgggcggccagcagctgcgcggtggtggtccccaccgagcgccatccgtggttgtccaggtagccggacacctcgtggcgggggccggcatagttgagtgcccagatgtccagatgaaagccatgctctcgccagcctcgggtcgcggt

SEQ ID NO: 1746 - DNA, 401 bp, Mycobacterium tuberculosis H37Rv
cgctcctatggggacaacgcccaaaacggcggtgggttggtgatcgacatgacgccgctgaacactatccactccattgacgccgacaccaagctggtcgacatcgacgccggggtcaacctcgaccaactgatgaaagccgccctgccgttcgggctgtgggtcccggtgctgccgggaacccggcaggtcaccgtcggcggggcgatcgcctgcgatatccacggcaagaaccatcacagcgctggcagcttcggtaaccacgtgcgcagcatggacctgctgaccgccgacggcgagatccgtcatctcactccgaccggcgaggacgccgaactgttctgggccaccgtcgggggcaacggtctcaccggcatcatcatgcgggccaccatcgagat

SEQ ID NO: 1747 - DNA, 401 bp, Mycobacterium tuberculosis H37Rv
ccgctgattggctacgtggccaccgacttgaacatcaccgtcccctgccaggccgccgccggactggccggatcgcagaacaccggcaagacggtgttgttgtcaacggtgcccaagcaggcgcctaaggccgtcgatcgcgggctgctgctgcaacgggccaacgacgacctggtgcttgtggtgcgtaatgtcccgttggtcaccgccccgctgagtcaggtgctcggcccgacctgtcagcggttgacattcaccgcgcacgccgatcgggtcgccgccgaattcgtcggactggtgcagggacccaatgctgagcaccccggtgcaccgctgcgcggtgagcgcagcggctacgacttccgcccgcagatcgtcggggtgttcaccgacctggccgg

SEQ ID NO: 1748 - DNA, 401 bp, Mycobacterium tuberculosis H37Rv
cctggccgggccggcgccaccgggtctgagcttctcggcgagcgtggatacccgctacagcagcagccccacgccgctgaagatggccgccatgatcctcggggtagcgctcaccggcgccgccctggtggcgctgcacatcctggacaccgccgacggcatgcggcaccggcggttcctgcccgcgcgctggtggtcgaccggcggtctggacaccctggttatcgccgtgctggtgtggtggcatttcgtcggggccaacacctccgacgacggctacatcctgaccatggcccgggtgtccgagcatgcgggctatatggccaactactaccgctggttcggcacacccgaggcgcctttcggctggtactacgacctgctggcgctgtgggctcatg

SEQ ID NO: 1749 - DNA, 401 bp, Mycobacterium tuberculosis H37Rv
acgctgcagaacgtggtgggcgcagcggatccggtgttcctggactggctggtggggctggcattcccctgccaacgcccgttcggccaccaatacggcgtcgacgagacacccaagtggcggatcctgccggaccggttcggcgccgaagccaactcaccggtgatggatcacaatggcggtggcccgctgggcatcaccgagctgctgatgcgcgcaaccacggtggccagctacctcaaagacgactggtttagggactggggcgcgttacagcggttgacgccttactaccccgacgcccagcccgctgatctgaacctaggaacggtgactcgcagcgggctgtggagtccggcgccgttgcgccgcggctagaagtgccgtggccaccgactcgg

SEQ ID NO: 1750 - DNA, 401 bp, Mycobacterium tuberculosis H37Rv
tctggcatgtcatcggcgccacctcgtccgatgacggctaccttctgaccgtcgcccgggtcgccccgaaggccggctatgtagccaactactaccggtatttcggcacgacggaggcgccgttcgactggtatacatcggtgcttgcccagctggcggcggtgagcaccgccggcgtctggatgcgcctgcccgccaccctggccggaatcgcctgctggctgatcgtcagccgtttcgtgctgcggcggctgggaccgggcccgggcgggctggcgtccaaccgggtcgctgtgttcaccgctggtgcggtgttcctgtccgcctggctgccgttcaacaacggcctgcgtcccgagccgctgatcgcgctgggtgtgctggtcacgtgggtgttggtg

SEQ ID NO: 1751 - DNA, 401 bp, Mycobacterium tuberculosis H37Rv
cgacgatcgccacgtacctgcgtggggactggtatcgcgactggggatcggtggagcagtaccaccggctggtgccggccgatcaggctccagacgccgttgtcgaggagggcgtgatcactgtgcccggctggggtcggccaggaccgatcagggcgctgccatgacacagtgcgcgagcagacgcaaaagcaccccaaatcgggcgattttgggggcttttgcgtctgctcgcgggacgcgctgggtggccaccatcgccgggctgattggctttgtgttgtcggtggcgacgccgctgctgcccgtcgtgcagaccaccgcgatgctcgactggccacagcgggggcaactgggcagcgtgaccgccccgctgatctcgctgacgccggtcgacttta

SEQ ID NO: 1752 - DNA, 401 bp, Mycobacterium tuberculosis H37Rv
cagaccaccgcgatgctcgactggccacagcgggggcaactgggcagcgtgaccgccccgctgatctcgctgacgccggtcgactttaccgccaccgtgccgtgcgacgtggtgcgcgccatgccacccgcgggcggggtggtgctgggcaccgcacccaagcaaggcaaggacgccaatttgcaggcgttgttcgtcgtcgtcagcgcccagcgcgtggacgtcaccgaccgcaacgtggtgatcttgtccgtgccgcgcgagcaggtgacgtccccgcagtgtcaacgcatcgaggtcacctctacccacgccggcaccttcgccaacttcgtcgggctcaaggacccgtcgggcgcgccgctgcgcagcggcttccccgaccccaacctgcgcccgca

SEQ ID NO: 1753 - DNA, 401 bp, Mycobacterium tuberculosis H37Rv
ccacgccggctacatgtccaactatttccgctggttcggcagcccggaggatcccttcggctggtattacaacctgctggcgctgatgacccatgtcagcgacgccagtctgtggatgcgcctgccagacctggccgccgggctagtgtgctggctgctgctgtcgcgtgaggtgctgccccgcctcgggccggcggtggaggccagcaaacccgcctactgggcggcggccatggtcttgctgaccgcgtggatgccgttcaacaacggcctgcggccggagggcatcatcgcgctcggctcgctggtcacctatgtgctgatcgagcggtccatgcggtacagccggctcacaccggcggcgctggccgtcgttaccgccgcattcacactgggtgtgc

SEQ ID NO: 1754 - DNA, 401 bp, Mycobacterium tuberculosis H37Rv
cgtctacccagcgttcggattccgcttcgatctgaagaaatcgggtgtgtccgttaccttctcgggtgacaccactaagtccgacaacctgattaccctcgctcaaggcactgacattctggtccacgaggcggtgttcagcctcgatacggcttactttggcaacgctttccccccgaactatctggtgaactcacacacctccgcagagcaggtgggggaggtggccgcagcggccaagcccaaacaattgatcctgagccactacgcccctgacgacctacccgactcgcagtggctcgacaagatcaagaagaattactcgggcatgaccaccatcgcgcgggacggccaggtcttcgccctctgatccgttagcggtagcgccccgttcgacgatc

SEQ ID NO: 1755 - DNA, 401 bp, Mycobacterium tuberculosis H37Rv
gacctagaggccgtggacaagctgcccttctcgacccctgaaaaggcgcagcgctaccaaacggaaaactatcgcggggccatgggcctcaactggtacctcacggatccgaccctgcagttcatcatggcctattacctacgacccgatgaattggcgttcgcagaaccccatctgacccgcattggtgagctgacgggggggccagtgacgcgttgggccgaggaaaccgaccgcaaccccccgcggctcgaacgctacgaccggtgggggcatgacatcagccgggtagtgctgccggaatcgttcatccaatccaagcgcgccgtcatcgaggcgcgacaagccgtgcgcgacgacgcggcacgggccggcgtcaagccgtcgctggcactcttcgc

SEQ ID NO: 1756 - DNA, 401 bp, Mycobacterium tuberculosis H37Rv
cgaccgccgagtcggtgatgatgttgccgaactcgtcgaaccgcagcgcgtggcctgccaacgtgggcgcctcggcgggttcggcggccgccttgggttccggctcgggttccggttccttttccaccacgtcacgcggcaggacctcgcgcaccaccacgtgcgcgttggcgccgccgaagccgaagctggacaccccggccagcgcgtagccgccgtatcgcggccagtcggtgggcgtggtgatcatcttcaaccgcatcgcgtcgaagtcgatgtaggggctggggccggcgaagttgatcgacggcggcagtttgtcgtgctgcagcgccagcaccaccttggccatgctggccgcgccggccgccgattccaggtgcccgacgttggttttcacc

SEQ ID NO: 1757 - DNA, 401 bp, Mycobacterium tuberculosis H37Rv
cggtcaccccatgcccgacggcgatggccgcccggatgtcatcgacgatgggctggtggtcgagcttatgcgtgccggccgcccgttcgccgacgatcaccagctgctcggaggtgtcctcggggtcgaatttcagcccggcgtgcgagtcgtcgaacactgtctgaggaagctggttggccggaaccgagaaggccgccgcgtagccaacccgcaacgccttggtcgactcctgcgccgtgcactcgagatcctgtgggtagtgattgcggccgtcgatgatgacgaggtccttgatccggccggctatgtagaggtggtccttgaagtaggtgccgtagtcgccggtacgcacccacagcgcgtcgtctggggcgccctcggcgcgcgactcgctgatc

SEQ ID NO: 1758 - DNA, 401 bp, Mycobacterium tuberculosis H37Rv
tgccggcggccaccgggtgtcggctccgccaacgggttacccgcgcacatcaacccctaccgcgctcacgtcggcgaacgcagtttgcagccagctttgacccgactgggtcctgcacatgctcttagttttctcttaatgttaagggccggtgcctgacagaccaaatcacaaggtaccgctgttcgaggccgccatcaacgtacgcggggcggtgtcgagtcgcccggttcatcggtggaccgccgcctagcgtccatcgtcctcggggaaatatcacctatgtttggggtggggcgcattttcgataagttgatgcgcccagttcaacgtccactcggtcgccggttctccatcggaattccagaattcgggtgtcgcatacatagcatggaccggct

SEQ ID NO: 1759 - DNA, 401 bp, Mycobacterium tuberculosis H37Rv
gcccgtcaggtagctaaccacacggcccgcggcgggagctagggacgggatttaggaaacatctagcggcggcgaccacaagggtcaccgccgctagatgttgtgtctgttcggagctaggcgccctggggcgcgggcccggtgttgggcgtggcacccagtgcccgttgcaggtcgggcttcatagcgttgagctgcgcgccccagtactcccagctgtgcgtaccgctgtccgggaagtcgaacacgccgttgtggccgccaccggcgttgtaggcgtcttggaacttgatgttgctggtccgcacgaagccctcgaggaacttggccggcaggttgttgccacccagatccgacggcttgccgttgccgcagtacacccagacgcgggtgttgttggc

SEQ ID NO: 1760 - DNA, 401 bp, Mycobacterium tuberculosis H37Rv
cggcgagtttgccgcccacagcgaccaacccgcgatccccagccagagcccgctgagcgcgccgactagccagcgaccggtctcccgcgaaaagtccttaccgtcgggcagcaaaataggaatgacccccaccggggccagcaaacaaaacagcggcgccagcaacacccggccgtgcataaagtcgccgccttgccgaatccagtacagcgcctgcagcacgccgctgccgacgatgaaagccaccacggccggcggactttgcaccgcccgggccacccgaccgtagtcgggtgccagcacgggacgcaggaacgacggccggcggcgcgccgtcatcaacagcaatcccagcggcaccgacagcaccaacggcacccacagtgcgtacggccggttga

SEQ ID NO: 1761 - DNA, 401 bp, Mycobacterium tuberculosis H37Rv
gcggtggccgacaacgtccagacgaaccgcagataggtgctggtgtagctttccagcgacttgcggatcgcagcgccggtgcgttcggccagatgcagctcggcgtagcgcttgccggccaccatgaacagcgaaccgaatgccatgatcagcaaaaaccacttggacagcgggattttggtggccacgcccccggcgatggcgcggatcaaatacgccgacgacacgacgcagatttccaccaccgcttgatgcttgagaccaaagcaatacgccaactgcatggcgaggtagacgaccattaccagcgccaggttcggggtcagcatccaggcaccggccagcgatgtcactcccagtaccaccgccacggtgtacgccagccactcgggcaccacgcc

SEQ ID NO: 1762 - DNA, 401 bp, Mycobacterium tuberculosis H37Rv
gtgctggtgtagctttccagcgacttgcggatcgcagcgccggtgcgttcggccagatgcagctcggcgtagcgcttgccggccaccatgaacagcgaaccgaatgccatgatcagcaaaaaccacttggacagcgggattttggtggccacgcccccggcgatggcgcggatcaaatacgccgacgacacgacgcagatttccaccaccgcttgatgcttgagaccaaagcaatacgccaactgcatggcgaggtagacgaccattaccagcgccaggttcggggtcagcatccaggcaccggccagcgatgtcactcccagtaccaccgccacggtgtacgccagccactcgggcaccacgccggcggcgatcggccggaaccttttggtggggtgctc

SEQ ID NO: 1763 - DNA, 401 bp, Mycobacterium tuberculosis H37Rv
ttgagaccaaagcaatacgccaactgcatggcgaggtagacgaccattaccagcgccaggttcggggtcagcatccaggcaccggccagcgatgtcactcccagtaccaccgccacggtgtacgccagccactcgggcaccacgccggcggcgatcggccggaaccttttggtggggtgctcccggtctgcctcgacgtcacgcacatcgttgacgaggtacaccgccgaggcggccaggctgaacaccacgaaggccatcgacaccttgctgagcacctcgacgtagtcgtagcggacaccgccgcccaacgcggccagcggcgcggccagcaccagcacgtttttcacccactggcgcgggcggatcgccttgaccaccccggcgaccaggtttgccgg

SEQ ID NO: 1764 - DNA, 401 bp, Mycobacterium tuberculosis H37Rv
cacgcgcttgtcgagttgggtggccacgcgctcggcaatcgtcaggccgaagaatcctgagccgacgacgaaaaggtcaaaacgagcggtcatcggttgcatagggtaaccgaccttgctggcaaaacccgatttggcagctcgtggcggtcatggcccgaacgggtttcaccgcaggtgcgcatggccgaccagtgtggttggccggaggtcgtttggtcgcgattgcctcacgattcgatataaccactctagtcacatcaaccacactcgtaccatcgagcgtgtgggttcatgccatgcactcgcgaccgcgggagccggcgaacccggcgccacacataatccagattgaggagacttccgtgccgaaccgacgccgacgcaagctctcgacagcc

SEQ ID NO: 1765 - DNA, 401 bp, Mycobacterium tuberculosis H37Rv
gggattctcgtgccgccgcatcccgtcaccgcgacgatcagcttcccgggtgctccggttcctattcccggtttcccaaccaccgtaaccgttttcggcacacccttcatgggaatggctccgctgctgatcaactacattccccaacagctcgccctggcaatcaaaccggcggcttagcgcggcgtggcccgttggttggtgtcgtaggttgccatgccaagctccaaccatgcggttagcagccgctgatctgccgccgcggccacaacctcgtcgtcatcgagttgctcggccgatgcgcagtgcaccgcgtcgtagccacgcatgggccaggtcagccgcgcgggtcacgacctgctcatccacctcgatggcgtccatctcggaccacatctggt

SEQ ID NO: 1766 - DNA, 401 bp, Mycobacterium tuberculosis H37Rv
gccaagctccaaccatgcggttagcagccgctgatctgccgccgcggccacaacctcgtcgtcatcgagttgctcggccgatgcgcagtgcaccgcgtcgtagccacgcatgggccaggtcagccgcgcgggtcacgacctgctcatccacctcgatggcgtccatctcggaccacatctggtcacggttcgcccgtcgcgaatctgcgcgaggggccggctcagtcacgcactcccgagccacaaaggcgccgggtcacgtgggccatgctaggaccaccagcgctccagcacccgcgcgacgccgtcctcgctattgggtgcagtgacctcgtcggcgacggccagcgcgtcgggatgcgcgttacccatcgccacacccaaaccggcccgcagcagca

SEQ ID NO: 1767 - DNA, 401 bp, Mycobacterium tuberculosis H37Rv
gcaggtggtcgatcgacacttcggtgttgtccggattcagccacgcatgctcgtagcccggcgagctgacgaactggggggtcgccgtgtcgtgtgcgcgctcgccgatccgctcgaccgccagtcccgcacccggtatgacgcgggtcgcaacttcggccaacgttgccagggcgtcgacgggcagggtgcgcaccgacatcacccgatcggtcccggggtcgtagatgacggcgccgttggcgcacaccgccatcggcgcgaagccgagggcatcgacgatgggtcgcacccagcgcggcggccggccggtggccaggatgaagtgcgtgccggcgtctaccgcggcatgcaccgcgtcgcgagtgcgtttggtgacggtttctccgtcatcgagcagg

SEQ ID NO: 1768 - DNA, 401 bp, Mycobacterium tuberculosis H37Rv
gcgcaggctgcgcataatgggaccggtgatcttgtgatcgaacacctcctgcttggccatgaaccgcaccttgcgcccgaggccctgttggtaggcgggcaaacccgcaaaggtgaagtcgaggtagctggtgtggttgatcgcgacgacggcgccgccgctggtcggtaggttatccacacccgtgacggtgatcttcagaccctgtatgcgccaggacaagcgagcaagccgaatgacggtgccgtataccggttccacagcagttcagcctagtggtcccggctgcaagccgcccaaagtggcgaaaacccaaattgacgaaagaggtgagccgtgtccttcccctcatcgccacccgcgctgcccgcgatcgttgcccggtttgccgtcggcaggcc

SEQ ID NO: 1769 - DNA, 401 bp, Mycobacterium tuberculosis H37Rv
accggggatgcggccgaaaccagcctgcacgcccacgcgccccaaagaattcatcgcactgctggacgagttgctcgccctccaccgaacgtgaacccacggtttcgcgcgcgattttcgcactgccctggggcacagcctcactccagacttaagccacagcgacgatccaagcgacgtgtcatgtgcctggtttaagtgtcgcgagcgtgccgtcggcggtgcggatatagatggatttcatggccgcgatgtaattggcgacggattcgcttgcgatcgggttgtccgggaataataccgtcactgtggtctgatgctgataccgattgacccacatcgagacctgatgagaaaccctaccttcgtcgtaaatcctaaaattcagatcggaattagcg

SEQ ID NO: 1770 - DNA, 401 bp, Mycobacterium tuberculosis H37Rv
tgtgcggtggttacacgatggctggtggcgtggccatggtgacgcttgtggtcctcggggccactccgttggccggacatttcagtgtggccgaggtacagatcgggaccgggctgattgccttgcttatcgcgtttgcgctgaccacaaatgtcataggcaagcatgtccggcgagctacccacgcccgcgtcggagacgacggtggcagggtcctacgggagtcggtaccgccaagtggtgcgcataagctggctgtgcgtgcacgttgttttctgcagggcgattcgctgtatgtcgccggggtgagtggcctaggagccgcactgccttcggccaactacatgggcgcgatggccgccattcttgcctccggcgctacgccggcaacacaggcactg

SEQ ID NO: 1771 - DNA, 401 bp, Mycobacterium tuberculosis H37Rv
cgcttgtggtcctcggggccactccgttggccggacatttcagtgtggccgaggtacagatcgggaccgggctgattgccttgcttatcgcgtttgcgctgaccacaaatgtcataggcaagcatgtccggcgagctacccacgcccgcgtcggagacgacggtggcagggtcctacgggagtcggtaccgccaagtggtgcgcataagctggctgtgcgtgcacgttgttttctgcagggcgattcgctgtatgtcgccggggtgagtggcctaggagccgcactgccttcggccaactacatgggcgcgatggccgccattcttgcctccggcgctacgccggcaacacaggcactggctgtcgttacgttcaacgtggtggcattcacagtggccgaa

SEQ ID NO: 1772 - DNA, 401 bp, Mycobacterium tuberculosis H37Rv
taggcggcggcgggcttgcctaacgcagagctctcacatgaaatgtccaggcgtctccgactgcgttgcgaccgtaaggcacgataacgtgtttgctattgctgctggtttgcgttggtcggccgctgtaccgccgctacacaaaggggacgctgtgaccaaactgctcgtcggggccatcgcgggcggaatgctagcttgcgcagctatattgggcgacggaatcgcttcggccgatactgcgttgatagtacccggtaccgcaccgtccccgtacgggccactcaggtcgctctatcatttcaatcccgcgatgcagcctcagatcggcgcgaattactacaaccccaccgctacccgccacgtcgtttcatatccaggcagcttttggcctgtcacag

SEQ ID NO: 1773 - DNA, 401 bp, Mycobacterium tuberculosis H37Rv
aggggacgctgtgaccaaactgctcgtcggggccatcgcgggcggaatgctagcttgcgcagctatattgggcgacggaatcgcttcggccgatactgcgttgatagtacccggtaccgcaccgtccccgtacgggccactcaggtcgctctatcatttcaatcccgcgatgcagcctcagatcggcgcgaattactacaaccccaccgctacccgccacgtcgtttcatatccaggcagcttttggcctgtcacaggcttgaattcgcccaccgtcggcagttctgtcagtgccgggacgaacaatctcgatgcggcgatccgcagcactgacggaccaatcttcgtggccgggttatcacagggcacgctcgtgcttgaccgcgagcaggcacggttag

SEQ ID NO: 1774 - DNA, 401 bp, Mycobacterium tuberculosis H37Rv
ccactcaggtcgctctatcatttcaatcccgcgatgcagcctcagatcggcgcgaattactacaaccccaccgctacccgccacgtcgtttcatatccaggcagcttttggcctgtcacaggcttgaattcgcccaccgtcggcagttctgtcagtgccgggacgaacaatctcgatgcggcgatccgcagcactgacggaccaatcttcgtggccgggttatcacagggcacgctcgtgcttgaccgcgagcaggcacggttagcgaatgacccgacggctcctccccctgggcaactcacattcatcaaggccggcgaccctaacaatcttctttggcgggcgtttaggccgggaacccacgtgccgatcatcgactacaccgttccggccccagcgga

SEQ ID NO: 1775 - DNA, 401 bp, Mycobacterium tuberculosis H37Rv
cggaccaatcttcgtggccgggttatcacagggcacgctcgtgcttgaccgcgagcaggcacggttagcgaatgacccgacggctcctccccctgggcaactcacattcatcaaggccggcgaccctaacaatcttctttggcgggcgtttaggccgggaacccacgtgccgatcatcgactacaccgttccggccccagcggaaagccagtacgacacaatcaatatcgtgggccagtacgacattttttctgacccgcctaatcgtccgggcaacctactcgctgacctcaatgcgattgccgcgggcggatactacggccacagcgccaccgcattctcggacccagctcgcgttgcgcctagggacattacgacgacaacgaacagtttgggtgcga

SEQ ID NO: 1776 - DNA, 401 bp, Mycobacterium tuberculosis H37Rv
gcatgctgccgatcagcttctccgcgccttccagttcgccgagaaccctgttgcccccgagcaggtcctgaaggtacgccagcgcgtcgatgaggccgccgaccgtggatatggcccggttaacttgggcccgtacgtcgccgagtttgctcgccatcaggttggctccaccggccagtttgtcgatgtcgccggtgtgcacagcgatctgcttggaaccctcatccagcttgctgccgacttcgccagcctgccaggacgtccgggcctgctccagcgaccgtccagcgggtcgggtaatgcccctgaccatcgcgacacccggcacttggctcacccgctgcaccatctgctctaggtcggcgagagccttcggcgtgcgcagatccgtcgaggattgg

SEQ ID NO: 1777 - DNA, 401 bp, Mycobacterium tuberculosis H37Rv
cgccaaaagcgccgggtgaggtcacggcgcggcgcgatccaaccgcgacgcccggtcagcaccatcagggcgggtagcagtgtgacagctgcgaagaagaccacggctaccgagattcccaacatcggaccaaccgttttgagaattcccagttgggtaaacaccatcccgagaaaggtgattgctacggtagccgcggaggcggcgatcaccttaccgatggatgtcaatgccttcttgacggcttgatccgaatccgcgccctgccgtaaatagtcgtgatatcgactaatcagaaataccgcgtaatccgttcccgcaccgaccatcatcccgctcataaaaataatgctctggttagcaataccgaggcccgccaagccggctattgcaacgaggcg

SEQ ID NO: 1778 - DNA, 401 bp, Mycobacterium tuberculosis H37Rv
ctgccgtaaatagtcgtgatatcgactaatcagaaataccgcgtaatccgttcccgcaccgaccatcatcccgctcataaaaataatgctctggttagcaataccgaggcccgccaagccggctattgcaacgaggcgctgtgcaaccaccacggacatgccaattgttatcaatggcaacaccatggtgatcggattcccgtagatgatcagcaaaatgaccaacaacaggatcgtgatcgcaaactcgatgcgactgcggtcccgttgcccggtgaggttcagatcggcgacggtggccgcgggcccggtcaggttagccgtcagtgtcgagcctgcgacctggtgttcgacgatgtcagcgacgcgggcgtacgcctgcttggactgggtcgaaccca

SEQ ID NO: 1779 - DNA, 401 bp, Mycobacterium tuberculosis H37Rv
tcgtcgaaacgaccgaccatcgtacttagcggataggtgaccctcccgtcgctgtaggtaccaacgttgaggccctcgaacagtttcgtcaccgccgagagcggtcccacttgtgcgtcgaaaaagttcaccagggaaaaaagcggttggggcctgcgcagcgacggcgacaattcgacgacccgttcgaacggcactttcgccagatccgcaccagtatcgaaggaggtctgcgcgattcgtgcaatctcgttaaaggacaatccggcgactggaacggtcaccgggatctgcccggtgaaccacccctgcgtcataaggtcggctggtgtgcggatatctttgggagtaattccaaaataggtatcggcgccggtcaactcgtgtatcgcgatggcgat

SEQ ID NO: 1780 - DNA, 401 bp, Mycobacterium tuberculosis H37Rv
accccgacgtcaacgccaacccgtgaaccgggctgtgccacgttgggctgctgcgggcgttgcacgaggacccgcacactggcgtcgagccgggtgccgttacggcgcaccgagattgccagcacccgcgcccggcctgtggcgatgagccgttcaatccggcgtgtgttctcgtgcgtacggacggtcccgacgaccggaagtgtgagatgacggcgatcaggttcgacgcgcatcgctccggtcgtgaatgtcacgcggtcctgatcgcggcctttcttcttgaaccgggggaagcccattgtcttgccctcacgtttaccggatcgggagttctgccagttccagtacgcatcgacagcgccgccaatgccgtcggcgtaagcctctttcgagcactc

SEQ ID NO: 1781 - DNA, 401 bp, Mycobacterium tuberculosis H37Rv
atcccggtgacggcgtctgccccgtgcacccgatggaggtgggtaagcatcttcgtcgggtcggtgaattggaccaccggatcgtccccgacaccgcgcaacgctaccgacatcacctccagatcgaccgtcggcaagctgtccaggcctaactcgctgctgaccgccgaggaggtcgggaactgcaccgatccggcgatctcgaaccggtacccgtcgaacagctccaccgtggaggccatcccgccggcgtagcgcttagcgtccagacacgcggtccgcagtccggctcgctgcagcagcactgccgcggtcagcccgttgtgcccggcgccgataactatcgcgtcataaccagtcatacgcgtctccagcaatgcaggctcgcacgcgctcgatgt

SEQ ID NO: 1782 - DNA, 401 bp, Mycobacterium tuberculosis H37Rv
cgtggaggccatcccgccggcgtagcgcttagcgtccagacacgcggtccgcagtccggctcgctgcagcagcactgccgcggtcagcccgttgtgcccggcgccgataactatcgcgtcataaccagtcatacgcgtctccagcaatgcaggctcgcacgcgctcgatgttttgtcaattatgacgaaactgtgagggtggtccaggtgtcggagatgccgacgcgcagcgactccagtgcgacgtggcagacccgcgccagctccccgagcgaccggtcactcccaagcatccaggcttccatcgcgccgaacaccgccgcggcgacgcatcgtgcggtgacggcgatgtgcaatcgggcatcgggtgcacccgcgatatcgcagttacgtcgccgcaa

SEQ ID NO: 1783 - DNA, 401 bp, Mycobacterium tuberculosis H37Rv
gcgcccgggcgcggcaacccggatttgtcggcacccgatgctatgaacggcccatgagcacggactgccgcgactgccgggcgggcttggatcactgccacggcaccgtcattcgtcatcccttggcacggccggaatgcaccgagccggactgtgtcagccccgagctgcaaccccatatcttcgtcctagactgcaatgccgtcagctgcgaatgcactgaatcggccacggcgcccgggtccttcagatcagcccatcgggtcggtgcttgacgtcaccgcgtgtgtgaccgggctggctgcggcttcagcggggtccggacaaaacggcggcttccggaggccccactgcacacaactccatcgcccatcggttatcggggccagcaccaccgactc

SEQ ID NO: 1784 - DNA, 401 bp, Mycobacterium tuberculosis H37Rv
atcgtggcgaggtgtccggttcgcaagcgctgctggagttgactgactatgcgccgctgccggtgcgtgaacccgtccgttcgctggtgtggatccgcggctgcctccaccagatcccgcccgcagagctggttgagaccctggacctgatcgccaccgataatccgaatccggccctgctacaagtcgagaccccgaggcccgggccggccgatgcggcggagacccggtataccatgcagcggctggagatcgaatccgtagtggtgaccgacgccaccggcgccgaacccgttaccgtggcggacctgctcgcggcccgacccgatccgttttgtgaaatcgaatcaaccttgctctggcacctagccaccgcccatgacgatgtggtcgcgcggctg

SEQ ID NO: 1785 - DNA, 401 bp, Mycobacterium tuberculosis H37Rv
ccgagttcaacaatgtgtttcggttgatgaccagcaacacataccgcaccacaaacaccacgaccgcgatgctgaacaccagcaggctcaccaacagcgtggtgcgcaccgccgccggcgatggccctgctttcgccgaggccggcacgggagcctggtcgacatggtcggttagcccccaccgcggtatcccggcgtagcggggagtaggcccacgtaaccgtgggccgtgccgtggcggcggtgccgccccgggtcgcaccgctatccaccgaaaacctgggggaagccgcggcggtgtgcgccgcgtgtcggaggccgtcggcacctgcgggcgcgccggtgtacgccagcgcgcctcggccggcatatccgccaacggcgccagcaacatcccccga

SEQ ID NO: 1786 - DNA, 401 bp, Mycobacterium tuberculosis H37Rv
tgccgccccgggtcgcaccgctatccaccgaaaacctgggggaagccgcggcggtgtgcgccgcgtgtcggaggccgtcggcacctgcgggcgcgccggtgtacgccagcgcgcctcggccggcatatccgccaacggcgccagcaacatcccccgacagcgtggacaccacacgcgttgccgctcacggacgttccagccagttccgcactgggagcacacttggatcaccagaccagcctagtgacttctccgccccgcaccggtacggcattgtccgcgccgtcaacaggcgttgaggcaggcttccgcgctggattgggcgcgcccggtcgcggcacgtccagcacgacacagctacctacgactatccacagtttccacagctttatccacagcgg

SEQ ID NO: 1787 - DNA, 401 bp, Mycobacterium tuberculosis H37Rv
gcgctcatctactcaaagaaggcctacggcacctgttttcggtcaaaggcgaagagagtaagcaggcactggaccggttgatcttctaggcgcggccccgagtgagcatactttggtggcttgtatctcttgtagtgccgctttgacggggtggtggtcaggtacggtggcctcgggagaggctggagggctcgacgttttcggctgagtgtctgggcccgtgaaagagatcgtctgctccagctttgtctcctgaactgacccggtttagggaattggtggccaggttgcggaagtgcgcagcatcgacgtgtacctgggtgaggcatcgaatcatcgacaagcaccggagccgcgcgtgaactcccgccgcgttgtggtcggggatgatgtgggagacc

SEQ ID NO: 1788 - DNA, 401 bp, Mycobacterium tuberculosis H37Rv
gatattccaggtttacgaccaccagacgaacttcccgctaggcattgttccgctgctgctgctcgacatgtgggaacacgccttctacctgcagtacaagaacgtcaaagtcgactttgccaaggcgttttggaacgtcgtgaactgggccgatgtgcagtcacggtatgcggccgcgacctcgcagaccaaggggttgatattcggctgaccccgctgccgcaagcgtcgggctcagtattccggagtcgcgcatcaccatcgcccttatcctggccttatattgcagctttgtgaacacggccgcggtggccgtgtcgagttgcagggcgcgtaaaccacgcgcatgcttggttactcgagctaccatttatttcgagctaccagcgtggttaggacgg

SEQ ID NO: 1789 - DNA, 401 bp, Mycobacterium tuberculosis H37Rv
ccttggccagcgatcaccactgggccggcgtatggatcggcaccaccctgggcatgatcctggccgacggcctggcgatcggcgcagggctgctgctgcaccggcgccttccggagcggttgctgcaggtcctgactggcctgctgttcctgctgttcggactgtggttgctgttcgacgacgcgttgggcttcagatcggttgccatcgccgtgacagcggcggtggtgctggccgcggcaactacggcggtatcggtgcgggtggcgcaaactcgtcggcggcggccaaccgctgctgcgacaccagaagatgactcgacacgccccgagcggtcgtcggtcgcgccgggccatcccgggagcatcttgctaccgcttccggaagtgtctttgcggggg

SEQ ID NO: 1790 - DNA, 401 bp, Mycobacterium tuberculosis H37Rv
cggcgccttccggagcggttgctgcaggtcctgactggcctgctgttcctgctgttcggactgtggttgctgttcgacgacgcgttgggcttcagatcggttgccatcgccgtgacagcggcggtggtgctggccgcggcaactacggcggtatcggtgcgggtggcgcaaactcgtcggcggcggccaaccgctgctgcgacaccagaagatgactcgacacgccccgagcggtcgtcggtcgcgccgggccatcccgggagcatcttgctaccgcttccggaagtgtctttgcgggggcgccgaccgccctcagggtcgcctgacgagcgctgtgcggacccaggcagcaaaggaggctctcggcgaatctccgttggctgctggttgcccggagtcgg

SEQ ID NO: 1791 - DNA, 401 bp, Mycobacterium tuberculosis H37Rv
gggtttcgtatcaaatccgagggcacagttcatcgcttcactgagtttagttgggacctaggcccagatgccgtcgcggcctggggcgccattgccctagataacaatctgataaagcggagcaaacaagctgtggtgcacactcgggcacgtatcaggttggctacacagcgaagcgcaacagctcttcagtggttatcgggcgctcgttcttggcggggaactcgtggcttttgaccgggtggcgaaaccatgaccaggcgattcgccccatccgtgaccggggtactgggttggtacgcacagcgacactcctgcgatcggacaactcgactggcacctcacattaaacctctatgtgacgaagcccacatcgactcattagacacctcggagctggc

SEQ ID NO: 1792 - DNA, 401 bp, Mycobacterium tuberculosis H37Rv
attattgaagcggtgcagcggtcggcttaacaggcgccggcagggcactggaacccatcaagtaccggtctacggccgcggcagcggcccggccctcggcaatcgcccagacgatcaatgactggccccggcccatgtcaccggctacgaacacaccaggaaccgaggtgtcgaagtcgtcgccacgggccacgttcccacgctcggtgaacttcactccgaggtcggtcaacaggcccgcccgttccgggccgacgaaacccatcgccagcaacaccaggtcggcttcgagctcgaagtcggagccctcaaccttgacgaacttgccatccagcatggtcacttcgtgtgcccgcagcgcgctcacgcgcccgtccgtgccgacgaacgcctcggtgttg

SEQ ID NO: 1793 - DNA, 401 bp, Mycobacterium tuberculosis H37Rv
cgccgcgccacgtacctcttccagcgcggcagccagcccagcacctccctcggagacccggtacagacagcgaatcaccttggaccgcaatccgtgtgggcgcccattgaccttgtcgttgggatcgaggctgaccagcttggcgagctcgtggttacgcagaatcggctggggcagcacgatctggtggcaggagttctggtccgggttgagcaagtcacgttcgccgccggtggtgccctgcaggctggtcaccacctcctcgcggatggcgtccaacggcgggttggtcacctgggcgaacagctgatggaagtagtcgtagagcatgcgcggacgctgcgacaacaccgcaactggagtgtcggtgcccatcgacccgattggctcggcaccgagcc

SEQ ID NO: 1794 - DNA, 401 bp, Mycobacterium tuberculosis H37Rv
aatccggctgcgctagctgcgtggcggtctgatcgccagccacaggaaatgcttagatacgtttgctgtgaaatccggagcaccgctgtttcgccacttgcgccggtgggaacaaccgccggaacggcgggtatctgtgttgttgcatggcgatgccgccgcgacgactacccagcgcaaccccccagagtttgcgcgatcctaaaaggggtctaaaaagggcgtctagacagccagcagtcagtccagggagctagccgatacgggacgatattggtcggcgtccggcatgggcgatcttaccgtggggctcatcagccgcgagctcgcctcagccggccaccggcgcgacaatcgatcgcctgtcacctgaggagcttatgtacgagcgtgacgaattc

SEQ ID NO: 1795 - DNA, 401 bp, Mycobacterium tuberculosis H37Rv
ggaccgtatcgtcgggatcgacgccgacaccgccttcggcaggctgagcagccgaatcgatcctcgagcagctggttcgttctgggagctgaccaccgacacgaatctgcggtccttcaccgatatcaccgcgcgcctgggccgaaattccgcgggactgtacgtcctggcaggccagccggcatccggtccgcgccgggtgctcgatccggccatctaccgcgaagccgccctaaggttggatcaccatttcgcaatctcggtgatcgactgcggttcctccatggaggcggcggtcacccaggaagtattgcgcgatgtggatgctctgatcgtggtgtcctcgccctgggcggatggtgcctccgctgccgccaacaccatcgaatggctgtcggatt

SEQ ID NO: 1796 - DNA, 401 bp, Mycobacterium tuberculosis H37Rv
ggttgccgcggcaaacctggccttgttcaccgaagccgaacgccgactcaccgaggccaacgactcgcccgccggtgaggcgtgtgcgcgcgccatcgcctggtatctggcgatggcacggcgcagccagggcaacgaaagcgccgcggtggcgctgctggaatggttacagaccactcaccccgagcccaaagtggctgcggcgctgaaggatccctcctaccggctgaagacgaccaccgccgaacagatcgcatcccgcgccgatccctgggatccgggcagtgtcgtgaccgacaactccggccgggagcggctgctcgccgaggcccaagccgaactcgaccgccaaattgggctcacccgggttaaaaatcagattgaacgctaccgcgcggcga

SEQ ID NO: 1797 - DNA, 401 bp, Mycobacterium tuberculosis H37Rv
ctgcgattgagcgtgtggcgcgtccggtaaaatttgctcgatggggaacacgtataggagatccggcaatggctgaaccgttggccgtcgatcccaccggcttgagcgcagcggccgcgaaattggccggcctcgtttttccgcagcctccggcgccgatcgcggtcagcggaacggattcggtggtagcagcaatcaacgagaccatgccaagcatcgaatcgctggtcagtgacgggctgcccggcgtgaaagccgccctgactcgaacagcatccaacatgaacgcggcggcggacgtctatgcgaagaccgatcagtcactgggaaccagtttgagccagtatgcattcggctcgtcgggcgaaggcctggctggcgtcgcctcggtcggtggtcag

SEQ ID NO: 1798 - DNA, 401 bp, Mycobacterium tuberculosis H37Rv
gcccagagcgcgcagggcggcagcggcccaatgcccgcacagcttgccagcgctgaaaaaccggccaccgagcaagcggagccggtccacgaagtgacaaacgacgatcagggcgaccagggcgacgtgcagccggccgaggtcgttgccgcggcacgtgacgaaggcgccggcgcatcaccgggccagcagcccggcgggggcgttcccgcgcaagccatggataccggagccggtgcccgcccagcggcgagtccgctggcggcccccgtcgatccgtcgactccggcaccctcaacaaccacaacgttgtagaccgggcctgccagcggctccgtctcgcacgcagcgcctgttgctgtcctggcctcgtcagcatgcggcggccagggcccggtcga

SEQ ID NO: 1799 - DNA, 401 bp, Mycobacterium tuberculosis H37Rv
ttgttgtcggacgcgttgagcgccgccgcgatgcgtcgcgccaaccgcagcgcatcaccgcggccacgctggcgggcgctggcagctgcagtggcggcgtcgcgtgccgcccgagccgccgacaccgggatcatcgacaccggcgtaccgtcatctgcagactcgctgcgatcgggtttgtcgatgtgatcggtcgacggcgggcgggcaggaggtgccgtccgcgccgaggccgcccgcgtgctcggtgccgccgccttgtccgaggtagccaccggcgcccgcccagtggcagcatgcgaccccgcgcccgaggccgcggccgtacccacgctcgaacgcgcgcccgctcccacggcggtaccgctcggcgcggcggccgccgcccgtgcgcccgggac

SEQ ID NO: 1800 - DNA, 401 bp, Mycobacterium tuberculosis H37Rv
ggccaccgcatcgatgacgccggcgccgaccaggtcgtcgaccccgcccccggggtgtctcgcggtggcggtgatccggtggatgatctgcgccggcgtcaggtcggggaaccgctgccgaagcagggccgccagacccgacacatatgccgcggcaaacgaggtgccggcgatgggtaccggcccctcccggccttgcagcgcattcaccggttcaccggtgtcgccgagcgcgacgatgttttctgcgggcgcggccacgtccacccacggtccgtgcatcgagaacgagctgggcatcccggtctggccgataccgccgacgcttaacaccagcggtgcgtaccacgccggggtgacaacggtctgcacattgttccagccgcgtgggtcgccgggtg

SEQ ID NO: 1801 - DNA, 401 bp, Mycobacterium tuberculosis H37Rv
aggttccgccgggacccgtggcgaagcgtcgacaccggtgtcgatcaccgccaccgtcaccccggccccggtcgcgaacttgtgggcatcggccacgcccagatacgtgttgctccacggcggatcgtggaacccggaccccggcagcgtggtgggcgacgcgcacaaaacgcgctgttcggtaggctgatccgggcccgtcacgtcgggcggcaacgcgcccggatcgatcggcggtggcgtgatggccgatgcgggcgacgcggtgagcaacgccagcgccaccgtgatcagaaagatacggtgcactcccagaacactccattcgttgagattcattgcgattcattgagctgcgttgctaccttgggccacttgacggacctgtgtgcattttagac

SEQ ID NO: 1802 - DNA, 401 bp, Mycobacterium tuberculosis H37Rv
cccgacggtccgatctcggtgactagctgcgccggcaacgggcagcgccgctgtccgcgtaggtgtggacgtggcccgcacatgttggccgcagccgcggcggcttgctcaccattgagccgacgcaagatcacactgggcggggtaggcgccggcgtcggtgtgcgcacggtgatggtcgcggtgcacgtcgcgtccggatacaccgttacgttctggatgacctcatcggcacgcagcgtccaggcttgcgagagaacccgcgacgaaatcgcctcagccgggtacgcatacgtcgtcatccacccggcttcaccgcggatagctttccagcgctgcgcactcccggctaccgcgtccgaccccagccggcgatcaagctcagccaagtctgttgcggt

SEQ ID NO: 1803 - DNA, 401 bp, Mycobacterium tuberculosis H37Rv
caacgctggtacgccagcgtaaagcttgggtgttgccgatcaccggaagccgcatgatcagccacgtttcgcgccgcccggcatacggcggcgtaccgatctccgcgtcatacacccgcgggtaatcgccgacggtgccggttcgcgagccgaaggtgacgacgctgattgaatcgagttccaggtccagcgggtggcgcagcaacggcgcgagctcaacgacgtcaatcacgttgtcgctttctacggtcaccgacccggtgaccgtagtcgcccggtgcgctcggccgagaagttgcaccgccaccaccgcgacaccgtcttgcacgcggacgccacccccggatcggttgttggccaaggtaattgggtcattccatttgacgggacgccgaccccgc

SEQ ID NO: 1804 - DNA, 401 bp, Mycobacterium tuberculosis H37Rv
cgaacccgcggccctgggtgatgaagaggcccaccgtcaagccggcaaccaacaacgccaaccaggcccacggttgacgtggcgtcagcaccccccataccgcggcgggcagtacgagcgacaccccgacgcacatacccacctgtaccgcgttaaccagccgcgccgacgcggcgatcgcggtgccgcgggcggtgatgtcggtcagttcattgtcctcatcgtcggcgtcggcttcgctgaccggagccaccgtatcgacgggcattcccgcacggcgcgcgaacagatcccggccggtgatcgatccgaagtgcgggggtcgtacccgtgccacccacaacgcaacggtcggagtcatcctgatcaggacaagcagccctaccagcacgcaaatcgcc

SEQ ID NO: 1805 - DNA, 401 bp, Mycobacterium tuberculosis H37Rv
cgaggcgtgaaacgagttgggtcaggatccgtggctagcgccgaacagcgcctgaaacgctgtctgcgagtccgcctcgtgtccctccatcagggctgcggcctgcacgaggccctcggccaggcgcgtgcccccggtaaggaccttgttcaattcattggtgatctcggtggctgtcatatgcgaagcaacgacgccggtaccagaccaggtggcggggttcatgacgttttcctggttggctaggtagcccttggcgattcccatggcttgctccatattcgcctggatatcgttggcggtgctgcgcagcatctgcggtgttacctgaattgtgtctgccacgggcccttctcctttactgccgttagccgttccccctcaaatatcggggcatgacg

SEQ ID NO: 1806 - DNA, 401 bp, Mycobacterium tuberculosis H37Rv
gggctgaaccggttcatcaccgcctcgccgatggccaccagcgccgtggtcttgccgcagccttgccgacctaagatcatcaaccctgggctctcgcgcagcttgatcggcaccggacccagctcgtggcgctctccgatcgcaaacgcgatcgacagatcgtcaccgccctggtggacggcctcgtgctcgacaatcgcggacagttccacccgctgtggcagccgctgcagacttgcgtgcttggtcaccccggccacgtcggcgattcgcgccccgacatcggtgatgcccaccagctcgccggtaccggggtcggccagggccggaacaccgattcgcagctcgtgcaggctttccgtcaaaccaaatcctgggcggttcaacgtccgccgcgccgc

SEQ ID NO: 1807 - DNA, 401 bp, Mycobacterium tuberculosis H37Rv
cgccgctcggcccacaaccgatcgacatccaattcccgggggtcgctaatgccgagcgaacgcagcagctcggccgcgccgctggtggaatcggtgacctcgctgcgactggtcggtgaccaccgcgccatcgcccgcgcatatcggtaggcccggtggatggacagctggtcggcatgcgcgaagaacgtgccgcgcgcccgcaacagcggcgccgggcgctggtcgtcatcggcgtctgcgccatcgcgaccggccttgaccgcggttgccgccccatgtcgttgggccatctcgaagacctggtcctcggcgaaccccacaccggtgcccacccgggacgcgatgcgcagcaccgtaagcccggccttgccgacctgcccgaccacgctctcccacgc

SEQ ID NO: 1808 - DNA, 401 bp, Mycobacterium tuberculosis H37Rv
acaacgattcgcgcgactcggcggtgatcacaccgctggtcgatgtcacgaagttggccgcgccgggcaacaccagcacctgggtggccaccaccgacgccggggcgcggtcatcgcgtaccagccgcacgatccggctgtccatcgacgggggcaccggaagcccccgcccgttgtagaccgcgacccgggcctgtggatccgtcgacgccttctcccacgacacgcaggtggtcggatccgccgcggtgtcaacgaaattcagccgcccggccgggtagtactccaccggcagcgaggtcacctgcggtgtgtggaccagcacatcgggggtcaccacccgcggcgccgccgccccgtaggagttcgcgctgcgcagcagatcggccacgaagctgctg

SEQ ID NO: 1809 - DNA, 401 bp, Mycobacterium tuberculosis H37Rv
ctcgtgataggccgcgaacgtcggagcgatgaactgccagacgcccctgctgggggtgccccgcgcggcgttggaatcccagtggtttatggcgttggcgttgtagttcgattcgcgacgggccaccaggtccatgccgcgagtccagcgtgcccgcgcggctggatcgtgaacgccttggatatccaacgctttttggatcgccgccaacacttgggcgcgtccaccgggtgtggttacctggggtcgtcttgccgcggcggtgcgcaggtagcgcagccggcgcagccgcagccccaatagccgcgcccgcgacctacatcgcgcgatgtgccgatgctgagcccgcagccgggcggccatccgggccatcgcctcccgccggcccagcggtgtgtcgg

SEQ ID NO: 1810 - DNA, 401 bp, Mycobacterium tuberculosis H37Rv
cccgcgacctacatcgcgcgatgtgccgatgctgagcccgcagccgggcggccatccgggccatcgcctcccgccggcccagcggtgtgtcggtcaaggccatggcatcggtcttggcggcttccaggagtgcacgcgtcgcggtcctggcgtgcgcatgatcgatctgggctgccgccatgatctgggccagcgcctcatcggtgttggccaatcgacgcagcgctcttgcggcgccgcgccagcggtacgccgctgcggtgggaacggcgttggccacccaggatatcgcgttcgcatactgctggatctgcggcgcgtcgatgtcggcgccggaaacgccgcccgcgaacaggccgtggccccgggacagcgccgctatcgcctgcgtggtcagggga

SEQ ID NO: 1811 - DNA, 401 bp, Mycobacterium tuberculosis H37Rv
ccgggacagcgccgctatcgcctgcgtggtcaggggatcagtcaagggttcgccttcggtgccaatcctgtgccatgtgctcacatccgttgccgggtgccatcacctcggccgtaccgaccagaccacgaccttgtcgattgcggccggtgcccctgcgccacgaccatactgccgttgacgcgacccgactactcagtcgtggcgcgaaggccgacctcgccccagggcgactattccttaaccttgtcgtcgttcggcacaacaaggatccgtcgcgtcgacttggtgaccaccggcttgtcgtcggcagatttcaccggaacactcggcggtactgttaagcggcccttgaccggttgaccattcggcacagcccgtcacccgcttctcgaccggct

SEQ ID NO: 1812 - DNA, 401 bp, Mycobacterium tuberculosis H37Rv
ccgcgccccgtccgcgacgtccagtccctccgcgccataggtctgttgaagcgcactcatcagcggctgcattgctccctgccccgcttgcatggcctgctggggaagctgcgtgagtgggcccatgacgccgccgaccgcgccgccgagcgcgccggtaatgcccgacaccgcttgttgcatcatctgcgtcgccccctaggcctccgcctgagcgcccaccccctggaattgttgggccgcatcggcctcattcgccgagaacttttgcacggcatcggccgcatgcgcccgccgatctaggtcctccaggccgctggactcgacgtcgccgggcacaccggaattaccggcggcgaaaagtgccccattagcgatgtcggcaggtgcgggtaggtcta

SEQ ID NO: 1813 - DNA, 401 bp, Mycobacterium tuberculosis H37Rv
gcggcgaaaagtgccccattagcgatgtcggcaggtgcgggtaggtctacggggacagcgggaaacggcgccggtccggacgctggcggcgtcgtcaaaacctgcaataagatttccggcgtcaccttgatcggaactcccggagccgggccgggtgccggattctgatctccggtcatgatcacacctcgaacttcatccgtagcgccccttcggacgctctttcgtgtgcttgtcgacattggccgcagcatcgccattttgtcacgccgcgcgtcgaccggtattcagctcacggtgtcgggcctcgtatggtgatcagggagtttcgggcagcggttcaggcagcgaaccctcgtgagccgccacgcctggtggttacggcataccaggccaggtga

SEQ ID NO: 1814 - DNA, 401 bp, Mycobacterium tuberculosis H37Rv
tacgggcgccgtaggaaccgagggcacggcgggggctgccacgacggggggccgtagatcagagccgtaagccggcagcggtcccgcggggacagccgagccaccaaccaccggcgcagcgggtgccgccaccggcccggcggtcaccacggtcggcgcgaccggcccggtagtaccggtcgacgccggtggagcgcccgaggtgttcgccggcgtgtcaactggcccgtgtgtggcttcgatgcccgcagccatggtcggcgcagacaccacgggcggtgtcgttatcggaggagtggcctgcggcgggggaaccgaccccgactgcatcgccgtcattgccccttccgacagcgaatgcgcgccagccgcggccggttgccccgtcaccatcccggtcg

SEQ ID NO: 1815 - DNA, 401 bp, Mycobacterium tuberculosis H37Rv
gtacttctctgccttagtgacctcggatttcgctccccgaaggtaccggccaatcaggtcttcggccgttctaccctgattccgcaacaaaagatcatgttggctgatcagattccttgcgagctcttgcttttgcatggcccaagtggcccagtgttgcgcggcggcacgtagggccgccgacggggccggccaccacggccccaccagcaccgcgctccacctaccgggcggaagatcagccgccaccacatacctgcttcatagcagcatctttcacgttgccgtcgtcaagtgcagcctgccactcagcttgagtgccaccactcgccattacgatcgttgtgcggtaagcggtcgctagcgcgcgcggcgtcgcggtgtttggcatctagggcggg

SEQ ID NO: 1816 - DNA, 401 bp, Mycobacterium tuberculosis H37Rv
gggccaccagcttgtatgtgtcgcacaattgccgctgagccgcggcagtctgggcagcggtgtaggtaggcaccgaggtcgtagccggtgtagccgcgggcctggcgtttgtcagggccacgatcagcgcagcgaccgccaccacagcagcgatcgcggccaccacgatggcgggccaactacgtgtgcgtggtatgggcaagggtgctggcgcggtcacgccgcagatggtatccgctgaccgcctgtttgccgcttgcaccagaccacaccaacccggacacgccgcggcggatgcgttacgtcaccggtgaccacgcggtgcaggtgttccaactgaccagcaccgttatcgatctcaccaccaagcgcaaacacaccacggtcgtgtacgcggccac

SEQ ID NO: 1817 - DNA, 401 bp, Mycobacterium tuberculosis H37Rv
taggagcgcccgaacaccgccccagccggatcatcaccggccatccccgcacacccggccagcgccgcggtcagcgacgagatcaccgcacccaaacccgcacccgcagccaccaccgcgccgcccgcgctatcaagggccgcgggatcgaccgccaacggcgccatcagctcacgaccacatacccaaattcgtggccatcgcgccggtgtagttggcgtgcgcgctctgccccgcggccgtgagctgggccaacgcctggcgcatcatcgcctcaccggcagcccaatgtcgttgcgcctcagcatgagccgccgcgccctcccccgtccacgtcacatgcagccgggtaaccaaggactcaatctcggcgaccagctcctcgacgtggcgaccgaatt

SEQ ID NO: 1818 - DNA, 401 bp, Mycobacterium tuberculosis H37Rv
accgaattcggccatccgcgccaccgcatcagccaacacggtcggatccacccgaaacggctcagccaccgcccacctcacgaagcacctgcgccgacgcggtctcgttgtgttgataacccgcaccggcgtgagctatcgccgccgccagcatcgacaatcccagctgcacctcaccggccccgcgatgccatagctcccacgccgagccatacgcactgcccgacgccccgcgccacccgcccaacatctgcccgacctgagcgtccagctcggccagttgaaccgcgagatgctcggccgctccatccaacgacgcggcgaaaccctgcatcaccgcaggctctacgcgcagcgtgtcgtcggcacccatggccgcaacctaacaatgcccaggcacc

SEQ ID NO: 1819 - DNA, 401 bp, Mycobacterium tuberculosis H37Rv
gaaacatcggctggagggttggtcattgacggtatcgacggtccacgagacgcgcaggtcgcggctctgatcggccgcgtcgaccggcgcggccggctgctgtggtcgctacccaaggggcacatcgagttgggcgagaccgccgagcagaccgccatccgcgaggtcgccgaggagaccggcatccgcggcagtgtgctcgccgcgctggggcgcatcgactactggttcgtcaccgacggccggcgggtgcacaagaccgtccaccattatttgatgcggtttttaggcggagagctgtccgacgaagacctcgaggtagccgaggtagcctgggtgccgatccgggaactgccgtctcgactggcctacgccgacgaacgtcgactagccgaggtggc

SEQ ID NO: 1820 - DNA, 401 bp, Mycobacterium tuberculosis H37Rv
gccgacgaacgtcgactagccgaggtggccgacgaactgatcgacaagctgcagagcgacggccccgccgcgcttccgccgctaccacccagctcgcctcgtcgacggccgcaaacgcattcacgcgctcgtcatgccgatgactcagcaccgggtcagcacaacggtcccgggccggggccgtgaccgcactgcaactcggctgggccgctttggcgcgcgtcacctcagcgatcggcgtcgtggccggcctcgggatggcgctcacggtaccgtcggcggcaccgcacgcgctcgcaggcgagcccagcccgacgccttttgtccaggtccgcatcgatcaggtgaccccggacgtggtgaccacttccagcgaaccccatgtcaccgtcagcggaacg

SEQ ID NO: 1821 - DNA, 401 bp, Mycobacterium tuberculosis H37Rv
gcgacggccccgccgcgcttccgccgctaccacccagctcgcctcgtcgacggccgcaaacgcattcacgcgctcgtcatgccgatgactcagcaccgggtcagcacaacggtcccgggccggggccgtgaccgcactgcaactcggctgggccgctttggcgcgcgtcacctcagcgatcggcgtcgtggccggcctcgggatggcgctcacggtaccgtcggcggcaccgcacgcgctcgcaggcgagcccagcccgacgccttttgtccaggtccgcatcgatcaggtgaccccggacgtggtgaccacttccagcgaaccccatgtcaccgtcagcggaacggtgaccaataccggtgaccgcccagtccgcgatgtgatggtccggcttgagcacg

SEQ ID NO: 1822 - DNA, 401 bp, Mycobacterium tuberculosis H37Rv
cgtgacgccgctgccttttgcccaagccgacctggatgctttgcagcgggttaatgatccgaggctgagcgcgatcgcaaccatcagccccgccgacatcgtcgaccgcatcctggatgtcagctccacccgcggcgcaaccgtgctgcccgacggcccgttgaccggccgggcgatcaacttgctcagcacccacggcaacacggttgccgtcgcggccgccgattttagccccgaggaacagcagggttcgtcccagatcggctccgcgctcttacccgctaccgcgccccggcggttgtccccgcgggtggtagcggcgccgtttgatcccgcggtcggggccgcgctggccgccgcgggaacaaacccgaccgttcctacctatctagatccctcgt

SEQ ID NO: 1823 - DNA, 401 bp, Mycobacterium tuberculosis H37Rv
gcatgaatcgatcaccgcgcgccgccaggacgccttgggcgcaatgctgtggcgcagcttggagccgaatgccgcgccccgtacccaaatcctggtgccgccggcgtcgtggagcctggccagcgacgacgcgcaggtcatcctgaccgcgctggccaccgccatccggtctggcctggccgtgccgcgaccactaccggcggtgatcgctgacgccgcggcccgcaccgagccaccggaacccccgggcgcttacagcgccgctcgcggccggttcaatgacgacatcaccacgcagatcggcgggcaggttgcccggctatggaagctgacctcggcgttgaccatcgatgaccgcaccgggctgaccggcgtgcagtacaccgcaccactacgcgagg

SEQ ID NO: 1824 - DNA, 401 bp, Mycobacterium tuberculosis H37Rv
cgtggtcatcaccggcgtcaagatcctcggctcgctgctggcgccgcatattaccggtgatccccagctggtcgcggcctatctcgggctggctaacggactcggatttctcgccggcacgatcgtcggctactacatactgcgtcgggccctgcggcccgacggcggccagctgatcggcgtcggcgaggcgcgaaccgtcctggtgaccgtcgccgcgtcgttgcttgccggactgctggcacacgtggccgatcggttactagggctaagcgagctgacggcccacgcgggcagcgtcggttcgctgctgcggctgtcggtgctggctctcatcatgctgccaattctggctgcggtcaccctctgcgcacgggtgcccgaggcgcgggcggcgctgg

SEQ ID NO: 1825 - DNA, 401 bp, Mycobacterium tuberculosis H37Rv
tggtcaacgcttgcctggaccggctgcgtcgggccaaagcccatccgaccgcccctctagaagatgtctatccggtcgcggaccggaccgcgcaggtcgagaccgcgatcgcggtgcagcgggcactgatgcggctgcccgtcgagcagcgggccgcggtggtcgccgtggacatgcagggctattcgatcgccgacacccgcccggatgctgggcgtggccgagggcaccgtcaagagccgctgcgcccgggcgcgggcccgcctagcgcggctgctgggctatctcaacaccggggtgaacatccggcgctgaccccgttgccggtccgtcgtagcatcgatccacgggctcgccgctaccccacatctggctattgccaccgggcatgacggacactg

SEQ ID NO: 1826 - DNA, 401 bp, Mycobacterium tuberculosis H37Rv
caagatctgccctcgcactcgaaaggctcgcatgaccgccccgcctgtccatgaccgcgcacaccaccccgttcgcgacgtgatcgttatcggctccggtcccgcggggtacactgcggcgctctacgccgcccgtgcccagctggcgccgctggtcttcgagggcacgtctttcggcggcgcgctgatgaccaccaccgacgtggagaactacccgggatttcgcaacggcatcaccggtccagagttgatggatgagatgcgggaacaggcgctgcgattcggcgcggacctgcgtatggaagacgtcgagtcggtatcacttcacgggccgctgaaatcggtcgtcaccgccgacggacagacccaccgggcccgagccgtgatcctggcaatgggcg

SEQ ID NO: 1827 - DNA, 401 bp, Mycobacterium tuberculosis H37Rv
ctgggcggagcgtagagcacatacccgaggcagggtggttcggcgtggctgcgctcatccgggactgccgttgcgacctgaccgcacgaaccccactccagcatcaccatcgacaaccaggcttccttttcgaattcggggtcggcgaggtggtcgtctttgccgagaatcgcggggtcgacctcccagaaaacgcagcgtcgcgcatgcttggggagctgctcgaaggcttcgagtcgtaacgctgtgatacgagcggacactagtctcctggcctccgtgcggcattgcaaccgatggccctacacctccgcgggccaatgtgcaccagcaacccttctagaataagagagtcgatcgctatcgggccagtattcgcgatgccactccagccgacttgc

SEQ ID NO: 1828 - DNA, 401 bp, Mycobacterium tuberculosis H37Rv
aacattcatcgtcggattgtgcgcggcctcaggcgtcggtgtcggtggtgtcatttcccgctggaatggttcgatagttgaagcctggcccgaccttacgagcgcggacggtccagcggccaccgggccccacggagcactcacgccgtccctccactcgccatccgtgccgaccctcgggcgatctgctttccacgtcgtgcgaacaccacggtcgcgggcggacgcaaatagttcgcgccacatgtcaccaccctgacatcaaccgcgcccgatgcgatcatcacacgccggtgctcccgtacttcgtcgtgagcccgctcgcctttgatggcgagcattcgcccgttcggccgtatcaacggcatgctccatttcgtcaacttgtccaacgcggccac

SEQ ID NO: 1829 - DNA, 401 bp, Mycobacterium tuberculosis H37Rv
cacgccttcgctttcgctgtgcacacctggcaccgctgcaaccgcatcgtggacgatcttccgttcgaacggcgtcattggaacgagttcctcgcggtcaccggtttcggccactcgccgcgccacctcgtcggccagcgccgccaattcctcccggcgccgccgtcgccacctcgcgatgtctagcatcaaccggctccgcacaccggtcttctgatgcaccgccaaccgggtgagttcctgcagagcgtcgagcacctcgcccccgcgcccgaccaacttgttcaggtcgtcactgccgtcgatgctcaccaccgcacgattgccttcgacatcgaggtcgatgtcgccatcgaagtccaacacgtccaataactcttccaggtagtcgcctgcaatct

SEQ ID NO: 1830 - DNA, 401 bp, Mycobacterium tuberculosis H37Rv
tcgtcgctcgaatacaccttgtggacccgccagggcacgtggcggtacaccgacacgccgttggggccgttcaaccggacgccctcacgccaagtccgctcacctttggccgcgaccggcgtaaccggcagcggtaagcgcatcgagcacctccactgggtcggtgccgagatcccagcgggacaaaatcagcagccccccgctgaccgtttcgatctcgagcaggcgcaccaggcggccgtaacggcgaaactcgtcgattcggatgatcttgatattggaatgtcgtaatagctgcgtccggaaccaacctcggatcgccaggccgtcgggggtaattgccagccttggacgtgcgcgccaagtggcgctcgcaaacaagatcagacccagcgcggcaa

SEQ ID NO: 1831 - DNA, 418 bp, Mycobacterium tuberculosis H37Rv
gggtgaagggccgtagccgccgctttggcgatagccctggtcgtagccgggagcgccgtagccggcagccgggccgggagaaacaggagggcgttgctcgtagggcggcggatagcccccctgcccttggtcggggtagcctcgaccctggtcctggtacccgcgctggtcggggtagccgcgttgctcggggtaaccgcgttgctcggggtaaccgccctggtcggggtacccgatttgctcggggtagtcgccctggtccgggtggcgcgggcgtgggtagcccggctggggcgggtagccgcccgtctcgggtggataccccccgcgggggtcagatccgccttgcggatccgggccaccacgcggatcctcttgcggacgcgcatagcggtcgtcgtaatactcgtcgggacgc

SEQ ID NO: 1832 - DNA, 401 bp, Mycobacterium tuberculosis H37Rv
cgagcccatgtgctgacggcgcgacgacgggcacgacggcacctggcggcgctgcgtgcgctgcggtaccgggtggcgcacggcccgggggtcgcgctggccaaacttcggctgccgtcgccgagcggtcgcgccggcatcgcggtccacgccgcgctgtcgcgacttggccgtccctatgtctggggcgcaacggggcccaaccagttcgactgttccggtttggtccagtgggcctacgcccaggcgggtgttcacctggatcgcaccacctatcaacagatcaacgaggggatcccggtgccgcgctcacaggtccggccgggcgatctggtcttcccgcaccccgggcacgtgcagctggcgatcggcaacaatctggtcgtcgaggcgccccatgc

SEQ ID NO: 1833 - DNA, 400 bp, Mycobacterium tuberculosis H37Rv
gaccgtgacgctgcccaacggtgagacggtgaccgcggccagtccccagctcgccgcggcgatcaaggcggcggccagcggcacaccgatcgcagatgcgttccaacaacagggaattgccatcccgctaccgggaaccgcggtcgccaaccccgtcgaccccgcccggatctcagcgggagacgtaggtgtgttcaccgccacgcccttgcccttggccctagcaaagctcttctggacggccagattcaacacatctcagccgtgcgagggccaaactttctaggctggatacatccagcggcgaccgcgaccgcgccggcgaggaccgaagcaccgacaccaaccaggccggcggccgctcgataggtactgaccgcccggtcacaacaagaggaga

SEQ ID NO: 1834 - DNA, 400 bp, Mycobacterium tuberculosis H37Rv
ccatgcgggcccgtgtttctgctcggcctcatcgcgacctagcgcggcgggactggtgtcagggtgcccgcgggcggatacccaggcgcctgcccgggtagtcccaccggtgccgaaccgggtgccggggcaggcgcctgagcgggcgccgcatgcgcaaccacttggaatccgttgacaatcgcatcggtggccggccctcggtgacgcctgcgacagcgcggtggtcaccgacagcgaaaccaggtacttgtcggctccggaggtggcgatgacgtggcgccgggaggtgttgagggtcatgtcgttttcgcggtaggtgccctcgatgattgatgacggaaagccgtcgaaattggccatcgaggcgtttgtggtctgccatgcgagcaatttctgg

SEQ ID NO: 1835 - DNA, 400 bp, Mycobacterium tuberculosis H37Rv
cgccgcaggccgtaccgccaccgagaacgacccaaccgccggccgccccgccccgggggccggacgtcccccccgcgacggtggccgaactgcgggaaacgctggccgatctgcgcgcggtgctcgaccggttagagaaggccatcgatgccgccgaaacgcccggtggataagccggcattcttagccggtgaactccgctatggctaccattcaagttcgggatttgcccgaagatgtcgccgaaacctatcgacggcgcgccaccgcagcggggcagtcgctgcagacgtatatgcgcaccaagctcatcgaaggggtgcggggccgagacaaggccgaggcaatcgagatcctggaacaggcgctcgccagcactgccagcccaggcatcagccgg

SEQ ID NO: 1836 - DNA, 400 bp, Mycobacterium tuberculosis H37Rv
tcggtggtagtcggacggcccaatcagacagcgcgggtcatatcacgcgttcgtgcacagttgggtgtttatccacaggggtgcgtttgtcggcggctggcggggcgtggcggcgatagcattcgaatatgagttcgatcacggtgtcggtggacccggtggacccggtggacccggtggacccggtggacccggtggacgccgtggtcgccgcgggatcagacgggctcactgtggcccgcatcgagtccgagatcggggccttggagttcctgaacgaactgcgcactgaactcaagagtggacagtttcgacctcaaccggtgcgggaacgcaagatccccaaaccgggcgggttgggcaaggtacggcggctggggattcccacagtggccgaccg

SEQ ID NO: 1837 - DNA, 401 bp, Mycobacterium tuberculosis H37Rv
cgtgtggtcgtggtcgcaacccacgacagcaggatgttgccgatggccgatcgcgtcgttgagctgacacccgatttcgcggagacaaatcggccacctgaaaccgtacatcttcaggccggcgaggtgctgttcgagcagagcacgatgggcgacctgatctacgtggtgtcggagggcgagtttgagattgtgcacgaattggccgacggcggtgaggaattggtcaaggttgccgggccgggggattacttcggcgagataggcgtgctgtttcacctgccgcgctcggcgaccgtgcgtgcccgcagcgacgcgacggccgtcggctataccgtgcaggcgtttcgtgagcggctcggcgtggggggtctgcgcgatctgatcgagcatcgtgcgct

SEQ ID NO: 1838 - DNA, 400 bp, Mycobacterium tuberculosis H37Rv
gctggatgctaccgagggcgtcgataggttctatccacccgcgtcagagtcttccgcgtcgtcagggcgttcatcaggttgcacgacaccgactgtgcttgccaaccacttcggtgccagcgctgagactgcggtggctcctgccgtggcgctgaagacgcccgtccaggcgaccggtcccagcggggtacacccgaaaagtggctgataaccggggtttgaatgatgccgaccaacaccccggcgctgcccagtgcggtggcaatgacgagcggactgtgccggcgcgtcagcagtgtctgcgctagctgggtcatcacgagtgcagtcaaacccattgtcgccgtgcgtcgttcggttccgggagtccagcgcccgatggcccaggctgccgttgcgc

SEQ ID NO: 1839 - DNA, 400 bp, Mycobacterium tuberculosis H37Rv
ctcgactccagctcgagcaccacgcagctgtcaccgacggtcttcgactcaaggacgatgtaccgctgaccgccaccgttgacatcggtgatcgggtcaccggagtgcaatgtttcgacgggcaccaaatccggatttccgtttgactccacgcgaaacacagtaaggcaattaagccgactagggaacactctgcgtggtgcgccacctcgacgcggaggcaccagcgggttggccgcggcgggctcgctcttgggtggtcgccagtgattgtgaccagctgccggagcgggaatgcgtgttggacagccgaatccccgcaattggcgcaacgtgccccggaagccgcgctacatttggctcctagccaccagacagcttgcccgaaaacggcagaggt

SEQ ID NO: 1840 - DNA, 400 bp, Mycobacterium tuberculosis H37Rv
tcggactcggcggtggcgggacagacgtggaaccgtactcgagccagtttggcggacgaattcttagcgtaaccatcgacaaatacgcctacgcgttcgcggagcgcggaacaggagatgagatcgcctttcgctcgccggaccgcgaccgagccggccaggcctcgatcgacgatctggcgtctctcgaagaagactttccgttgcacgtcgccgtctaccggcgggtgattgcggagttcaacggtggtacaccgtttccgctccagctggcgacgcaggtggacgctcctcccgggtcggggctgggctcgtcgtctgctttggtggtggcgatgcttctcacgacatgtgcgctcatcggctcgtcgccgggcccatacgagctggcgcgactggc

SEQ ID NO: 1841 - DNA, 400 bp, Mycobacterium tuberculosis H37Rv
aggtcgcgcagtccagcggcatggtcgccgggaaagtctcgggtgccggtgggggtggcttcctcatgatgatcgtggacccgcgtcgccgtatcgaagtcgcacgcagcctcgaacgagagtgcggaggatcggtggctccttgcctgtttaccaaaggcggagcggtgacctggcatatcccagagtccacggcacccgtaaggcgtggagttgctgatgccgtggcttcagcgctcggaaacgctggaatcttgctgtgtgctggctgtgtccttgcgacgagccactcgacttggcgcgtaccggtttgacgatcggggagcccagtgcaagcatgagaccccgcaagcaccgggcgctgacgcctcttcgtgaggtgactgagacgacacctccg

SEQ ID NO: 1842 - DNA, 401 bp, Mycobacterium tuberculosis H37Rv
gaccttgtcgccgaaggcgtcttgtgccgcggtcagcgcttcccggtagttcgcccgggcgtggtccagcttggtgatgaccaccgcgcggggcatgccgacctggctgcattcctgccacagggacttggtcggttcgtcgacgccctcgttggccgcgatcacgaacagtgcgcaatcggcggcccgcaacccggcccgcagctcacccacgaagtcggcgtacccaggggtgtcgacgaggttgaccttgatgccgtcgtaagccagcgaggcgaccgcaaggcccaccgagcgctgttgccggatctccgcctcgtcgaagtcgcagaccgtggtgccctcggtgaccgagcccggcctggacaacaccttggccgccaccaggagagcctcgatga

SEQ ID NO: 1843 - DNA, 401 bp, Mycobacterium tuberculosis H37Rv
gcctggacaacaccttggccgccaccaggagagcctcgatgagggtggtcttgccgccccccgagggccccaccagaaccacgttgcgaacgccgccgggcccgtttgcggtgggagcggcggccgcgccctgggaagcattcactctgtcggccatggctttcctccagttctccggggtcggttcccgtggtgtggcccagcaggacgtagtaggcaacttttctcccaactgccgcccagcacaagggtcgggtcaggtgagtagtaggcaatcggagccgtcgttgtggtcaggcgtgccagctggcccagcgctggactgctattgcgattaccgggccgttcaacggaaccgattggtattgagcatatttggcgcgcagcaggcggtatgcggc

SEQ ID NO: 1844 - DNA, 427 bp, Mycobacterium tuberculosis H37Rv
gcgcccacccaggcgctgctggggcgccccttgatcggcaacggtgccgatggggcgccggggactgggcaggccggcggggctggggggatcttgtacggcaatggcggcaatggcggctccggggcggctgggcaggccgggggtgccggcgggccggccgggctgatcggccatggcgggtccggcggggccggcggctccggcgcggccggcggggccggcgggcacggcggatggctgtggggcaacggcggcgtcggcggatccggcggggcgggtgtcggcgcaggcgtggctggcggtcacggcggtgcgggcggtgccgccgggctgtggggcgccggcggcggcggtggcaatggcgggaacggcgccgatgccaacatcgtcagcggtggagacggtggcctcggcggtgccggtg

SEQ ID NO: 1845 - DNA, 400 bp, Mycobacterium tuberculosis H37Rv
cggccacggcggagccgtcacggccggcaacaccggtatcggtggcgccggcggcgtcggtggggacgccaggctgatcggccacggtggcgccggcggtgccggcggggaccgcgccggagccttggttggccgtgacggcgggcccggtgggaacgggggcgctggcggccagctatacggcaacggcggcgacggcgcccccggcaccggcggaacactgcaggcggcggtgagcggattggtgacggctttgttcggtgcacccggccaacccggcgacaccggccaacccggctagccccgatcaacgagggtttcggtgccggtccggggcatggccatccgctgagctggcgatctggactacgttggtgtagaaaaatcctgccgcccggac

SEQ ID NO: 1846 - DNA, 401 bp, Mycobacterium tuberculosis H37Rv
ggtgctgtgtcccgacctgcgcggcgcgggctggagttcggcgccccgctcgcggtataccaagaccgagatggctgacgatctggctgcggttttggacggcctgggtgtggccaaggtcaagctggtggcccacgattggggtgggccggtcgcgttcatcatgatgttgcgccatcccgagaaggtgaccgggtttttcggcgtgaacaccgtggcaccctgggtgaagcgcgatcttggcatgctccgcaatatgtggcggttctggtatcagatccccatgtcgctgccggtgatcggcccgcgggtgatcagcgatcctaagggccgctacttccggctgttgaccgggtgggtcgggggcggatttcgggttcccgatgacgacgtgcgcctgt

SEQ ID NO: 1847 - DNA, 400 bp, Mycobacterium tuberculosis H37Rv
gtgtggccgaaggtcaagctggtggcccacgattggggtgggccggtcgcgttcatcatgatgttgcgccatcccgagaaggtgaccgggtttttcggcgtgaacaccgtggcaccctgggtgaagcgcgatcttggcatgctccgcaatatgtggcggttctggtatcagatccccatgtcgctgccggtgatcggcccgcgggtgatcagcgatcctaagggccgctacttccggctgttgaccgggtgggtcgggggcggatttcgggttcccgatgacgacgtgcgcctgtacttggactgcatgcgcgagccggggcacgccgaggccggatcgcggtggtatcgcacctttcagaccagggaaatgctgcgctggctgcgcggcgagtacaacg

SEQ ID NO: 1848 - DNA, 401 bp, Mycobacterium tuberculosis H37Rv
gaccgggtgggtcgggggcggatttcgggttcccgatgacgacgtgcgcctgtacttggactgcatgcgcgagccggggcacgccgaggccggatcgcggtggtatcgcacctttcagaccagggaaatgctgcgctggctgcgcggcgagtacaacgacgctcgggtcgatgtcccggtccgatggctgcacggcaccggagatccggtgatcacgcccgacctgctggacggctatgccgagcgggccagcgatttcgaggtggagctggtcgacggcgtgggccattggatcgtcgagcagcgacccgagctggtgctcgaccgggtgcgtgcgttcctagctgcggggaccgagcagcgcgattgacgcatccaccgccggctcgacgatgttccgg

SEQ ID NO: 1849 - DNA, 400 bp, Mycobacterium tuberculosis H37Rv
agctaaggcatgtgcgggctcagccgaagacttcggtctcagccagggcctccgtcagcctgcgtgccccatcggtgaactgccagacggtgtgctcgattacggcggctgtgtcgcggcggcgcagcgcggcgatcagctgccgatgactgttcaccgcgtccgcgccccatcgcgggtcggccgcgaacacctgcgcccatatagcgcgcggcattaagcaggaaccaggccaacttgatccggcggctcgctttgttgaagacgcggtggaacgcgaactcgatcgacgcgatggttttggcatcaccggacccgatagcaccggccagcgcattgttgatgcggtccagctcgtcgatctcaacgtcggtgatgtgagcggtggccgatgtggcaa

SEQ ID NO: 1850 - DNA, 406 bp, Mycobacterium tuberculosis H37Rv
ttcgaacgggcgcgatcgctggccaccgacaggtaccgcccgcagctgagcatccaacaggattcggtgcgcgagtcgggacctgttcgtaaccagtactgggttaccgacagcgcggtgctgtcggcgacaccagctcaggcgaccatgctgttgttcatgcagggtgaacgcggtacaccacccaatcagcggtatattcagtcaactgtgcgggcgatcttccaaaaatcgcgcgggcaatggcgcctcgacgatctggcagtcgtgatgaaaccccgacaacccaccggcgaaaaatgagcccccgtcgtaagtttgaacccggcgagggggcgctgctggccccgcagtcaatcgaaccgtcgcggcgatggggtttgccgctggctctgaccgcatccgc

SEQ ID NO: 1851 - DNA, 400 bp, Mycobacterium tuberculosis H37Rv
gttggtgccgctatgccacactgggctgaagaacgtcaccggagggaaagcaattatgtcgcgctggaagcagggctggacgagggggagtctattcgccgctctgaacatagccgcagtggttgcggtgctgatgctgggtgctggcgttgccgtggcggacccggacgcggctcccggcgatcccggaggtcccggggccccgggggcacagcgggacccgtcgacccgccggcagttgacctgttggcgccgccacccgacccgttggcgctgccgccggcacttgacccgttggcgccgccgccacctgacccgctcgcgccgcccccgcctgacccgctggcagtgccggtagcagcgggccccgttgccgggcaggatccgacatcgtttgttg

SEQ ID NO: 1852 - DNA, 400 bp, Mycobacterium tuberculosis H37Rv
tgggggccactattcgcggctgtgggcggcccatactcgactgtgttcgccggaaatcactcagcttcaatgtattgacgcatagacgtcaccaagccaccgaatgggtggcgagttgaccgggcgccggatcccgacggttgtggttgatctgccgaatcaacggcttctggccacgaacatgtgtccgcgactggcgtctgcgataccaacccaatcggttactatagaaactgttcccgccgacaactaactcccttgttcgcgtggaggggttctcgggtccggtcagcgaggtccggagcggggcggaaatttcattgaacagccgtagaagttcagccaggaccggaacggatccagcggcaagcatgccttcaggagccatgttgtcgaatca

SEQ ID NO: 1853 - DNA, 400 bp, Mycobacterium tuberculosis H37Rv
cgcgctgcccaacggctttgggctggactacaccggcgacgacgggcgcaccgtcgtcgccggtgtcgccccgaacgcacttacttcgacgagatggcgcgacccctacgccggcaccccctggcacaagcacgtgcccgccgccatccgccgagcagacgcagaatcgcccatttggtatcccaaatgggcgattctgcctgctcgcggggtcttagcctagttccagatccggaccctgcgctgcgggtccagaaacagcgcgtcatcctcggtgacgtcgaaggcctgataaaaagcgtccacgttgcgaaccacaccgttgcaccggaactccggcggggagtgcggatcgaccgccaaccggcggattgcttcggctgcacgcgatttggttcgc

SEQ ID NO: 1854 - DNA, 400 bp, Mycobacterium tuberculosis H37Rv
caaggtcgatcgcgttcgaaccgcaattgccgcgcaccgacaccggaaagctctacaagagcgggctggtcgaaaaatactcggtgtgaccgatgctgccgggggcccgacctgtccacccagacaccggctatatcccgccccgggccaccagttgtccggctatcacgttgcgctggatctcgttggtgccttcaccgccgttccacgtcgtactcggtcgagtagccgtagccgccgtggatacgcacggcgtttagggcgatttccatcgcgacctcggaggcgaacaacttggccatcccggcctccatatcgcagcgttggccgctgtcgtaccgctcggcggcatagcgggtcagctgacgggccgctgtgagcttggtcgccatgtcggcca

SEQ ID NO: 1855 - DNA, 2292 bp, Mycobacterium tuberculosis H37Rv
cggccgctatgtgcctgaccccgctcctaccaagcggcagttgctgtccgcggcgttcatcgaccacttgcgccacctcggccggattcctgcaaccatccggtacaccacgcagggtctaggccgggtgcgacgtagctcgcgcaagctctcacccgcactgaccatgccatttaccccgccaccgacgttcatgaatcaccggctcaccccggagcgcaggttcgccaccgccaccctggcgctgattgacgtgaaggcgacggccaagttgctgggggcgacgatcaacgacatggtgctggccatgtcgaccggcgctctgcgtaccctgctattgcgctatgacggcaaggccgaaccgctgctggcgtcggtcccggtgagttacgacttctcaccggagcggatctccggtaaccgcttcaccggaatgctggtggcgctgcctgccgactccgacgacccgttgcagcgggtgcgcgtctgtcacgaaaacgcggtctccgccaaggagagccaccagcttttgggaccggagttgatcagccgctgggcggcttactggccacctgccggtgcggaagccttgttccggtggttgtctgagcgcgacgggcagaacaaggtactcaacttgaatatctcgaatgttcccggtccgcgcgaacgcggccgcgtgggggccgcgctggtcaccgagatctattcggtgggcccgttgaccgccggtagcggattgaatatcacggtgtggagttatgtcgatcagctcaatatctcggtgttaaccgatggttccaccgtgcaggacccgcatgaagtaaccgcgggaatgatcgcggacttcatcgaaatacgccgcgccgctggtctttccgtggagttgacagtcgtcgagtccgcgatggcgcaggcatgacacgaaacaccggacgagtatgaggccagtatgagcagcgaaagcgacgcagccaacaccgaacctgaggttctggtagaacagcgggatcggattttgatcatcacgatcaaccgcccgaaagccaagaacgcggtcaacgccgcagtcagccggggcttggccgatgcgatggatcagcttgacggcgatgccggcctgtcggtggcaatcctgaccggtgggggcggttcgttctgcgcgggcatggacctcaaggcgttcgcccggggcgagaatgtcgtcgtcgaaggtcgcggccttggctttaccgaacgtccgccgaccaagccgctcattgctgcggtggaaggctacgcgttggcgggtggcaccgagctggcgcttgctgccgacctgatcgtggcggccagggattcggcgttcgggattcctgaagtcaagcggggtctggttgccggcggcgggggattgctgcggttgccggagcgcatcccgtatgcgatagccatggagttggcgctgaccggtgacaacctaccggccgaacgcgcgcacgagctggggctcgtcaacgttttggccgagccggggaccgccctcgatgctgcgatcgcgttggcggagaagatcaccgccaatgggccgctggcggtggtggccaccaagcggattatcaccgagtcgcgtgggtggagtcccgacactatgttcgctgagcagatgaagatcctggtgccggtgttcacctccaacgacgcgaaggaaggtgcgatcgcgttcgccgagaggcgccggccccgttggacgggcacctagcccagctacgcgacggtgtagcccatcggcagcaggacactcttttgctgggtgaagtgttcgacaccctcgggcccgttctcgcggccgattccggagttcttgtagccgccgaagggtgagccgggatcgaaggcgtaccagttgattccgtatgtcccggtgcggatctgctgcgagatcttgatgcctttgggcacgtcggtggtccacacgctgcccgccagcccatacactgaatcgttggcgatcgcgatcgcgtcctcctcggtgtcataaggaatgatggccagcaccggcccgaagatctcctcctgtgcgatggtcatcttgttgtcgacatcggcgaatacggtgggttggataaagaagccgttgtccaagccctcgggacggccgccgccgcacaccaaccgagcgccctcctcgatgcccttggcgatgtagccttcaacgcgagtccgctgcttctccgagatcagcggcccgatctgagctgccgggtccgacggcgggcccaccgggagagccgttacgaaattagttaccgc

SEQ ID NO: 1856 - DNA, 400 bp, Mycobacterium tuberculosis H37Rv
gatcgcgatcgcgtcctcctcggtgtcataaggaatgatggccagcaccggcccgaagatctcctcctgtgcgatggtcatcttgttgtcgacatcggcgaatacggtgggttggataaagaagccgttgtccaagccctcgggacggccgccgccgcacaccaaccgagcgccctcctcgatgcccttggcgatgtagccttcaacgcgagtccgctgcttctccgagatcagcggcccgatctgagctgccgggtccgacggcgggcccaccgggagagccgttacgaaattagttaccgcagccacgatttcgtcgtaccgggagcgcggagccagaatgcgggtctggttgacgcagccctgtccggcgttcatgacgccggagaacaccatcatc

SEQ ID NO: 1857 - DNA, 400 bp, Mycobacterium tuberculosis H37Rv
gggctgatttcgatctgcgcggccggcggccaaggtgtggccgcgattttggaggcctgacgctgacggctcggtaagtgcctcgcgggaagtcccgagtggccggtgggccgcccaaagaaatgtgttgcgggtggtttgcgccctgagcagatgggtacccgatcactcggatagccccgtgttgttgtctgacccccgaccccgacggcaatgcggggcaatcccctggaaagggccgccgctggtgggaggggacccagcggcggtctttttgggcttgccccatcgttcgttgactctgcgtccaccacgcaaaagtgcgagtaacccgtccggtggacgcagagtcaacagataaggatcagaacgcggcctcgtcgagttccatgatgtcgtt

SEQ ID NO: 1858 - DNA, 401 bp, Mycobacterium tuberculosis H37Rv
acgccgcgtgtggtcgcaggtctgcctgctatggcaagccgttgagtccgttctcgccgagcagcagcccgccggtgccgccggcaccgggcgtggccccggctttgccggcgttgccgccgttgccgccgttgccgatcagcacggcgttgccgccgacaccaccgctgccgccggtaccggcgccaaacccgccggcaacccccgtcaccgccgttgccgaacaccccggcgtggccaccgtcaccgccggtgccgccggtaccggcgcctagagcgttggcaccgctgccgccggcgccgccggcgccggcggagccgaagagcaagccgccgttcccgccggcgccgccggcgccgccttgctggatgctggtaagtgctgccccgccgtgcccgcc

SEQ ID NO: 1859 - DNA, 400 bp, Mycobacterium tuberculosis H37Rv
tccagcaccggtggctatcccgccggtcccgccattgccaccggtaccgaacaagatcccgccggccccgccggccccgcccgtagccgtggcggcggtgttggtcgcaccgtgcccgccgttaccgccgttgccgaacaaccacccgccggccccgccggcagccccggtccccggggtcccgttggcgccgttgccgaacagccacccgccggccccgccgtcagccccggttccaggagtcccgttggcgccgttgccgatcagcgggcggccggtgagcgtctggaagggctcgttcaccacattgagcacattttgctgcagggtgtgcagtggcgaggtgctcgcgggagcattgaatccgtctagaccgagcagcagcccgctgacgccgccc

SEQ ID NO: 1860 - DNA, 456 bp, Mycobacterium tuberculosis H37Rv
ctgctgtcggcgaacccgccatgcccgccggtgccgccggcgccgaacagcccgccagcgccaccggccccaccggccccgccggagctgccggccccaccggatccgccgaccccgccggtggcgaacagcccgccggccccgccggcgccgcccgccccgccgagtgcactgccgttcgtgaatccgccggccccgccgactccggcggcgccgaagagcaggccggcgttgccgccagccccgccggcgccgccggccccgcccgtgagggctactacgccgccgccggcgccgccggcgccgccggcgccgaacagcatggcgttgccgccggctccgccggacccgccgatcccactgctggcgaccccgccagcgccgccggcgccgccgttgccgatgagcccgccggcgccgccgttgccgccggcgccgccgttgccgccggcgccg

SEQ ID NO: 1861 - DNA, 418 bp, Mycobacterium tuberculosis H37Rv
cgccggcgccgccggccccgcccgtgagggctactacgccgccgccggcgccgccggcgccgccggcgccgaacagcatggcgttgccgccggctccgccggacccgccgatcccactgctggcgaccccgccagcgccgccggcgccgccgttgccgatgagcccgccggcgccgccgttgccgccggcgccgccgttgccgccggcgccgccgttgacgccggccgcgccggatcctccggcgccgccgttgccgattaaccagccgccgtccccgccattggccccggtgccgggggcgccgttggcgccgttgccgatcaacgggcgcccggtattcgccaggaagaactcgttgatcggatccagcagcggcgacaccgcggcggcctcggcggccgcataggcgccgccacc

SEQ ID NO: 1862 - DNA, 409 bp, Mycobacterium tuberculosis H37Rv
cgccgctgccgccgttgccgccgaaggtgccgccgctgctgccgccagcaccgccagtgccgccggcgccgaacagcccgccgtgccccccggcgccgccgtcggcgccgagcgtgcccgccccgccggtgccgccggcgccgaagagcaatccgttccccccggtcccgccattcgcgccaaacccgccggccccgccggccccgccgttggcgaacagcccaccggtaccaccggctccggcggtgccgccggcaccgataaagttttgggagagggcggcctggccgccggtccctgcggcaccgaggaacaagccggcgtcaccgccgcgcccgccggccccgccggtgtccaggccaaacccgccgctgccgccggtgccgccggagccgatcagcaaggcggc

SEQ ID NO: 1863 - DNA, 409 bp, Mycobacterium tuberculosis H37Rv
tccgccggatccgccggccccgccggtgccggcgtcggttgccccgccggcgccaccgaccccgccgtcggcgaacagcccgccgtttccgccggccccgccggcgccgccggtggcgccgaaagcggctgcgaatccgccgggaccgccgaccccggcggccccgaacagcatgccggcggccccgccggcgccgccggcgccgccggtccccgtgctggccctcccgccggcgccgccggcgccgccgttgccgatgagcccgccggcgccgccgttgccgccggccccgccgttgacgccggccgcgccggatcctccggcgccgccgttgccgattaaccagccgccgtccccgccattggccccggtgccgggggcgccgttggtgccgttgccgatcagcggg

SEQ ID NO: 1864 - DNA, 400 bp, Mycobacterium tuberculosis H37Rv
cgcggcggcaacggtggtcatggcgggctgtggatcggcaacggcggcgacggtggtgcgggcggtgtcggcggtgtcggcggggccggtgcggctggcgcgatcggcggccacggcggcgatggcggctccgtaaatacccctattggcggcagcgaggccggtgacggcggtaagggcggcctgggcggggacggcggtgggcgcgggatattcggccagtttggggccggcggggccggtggtgccggaggcgtcggcggcgccggcggggctggcgggaccggcggcggcggcggcaacggtggggccattttcaatgccggtacccccggcgccgccggcacgggcggtgacggcggtgttggcgggaccggtgcggccggcgggaaaggcgggg

SEQ ID NO: 1865 - DNA, 415 bp, Mycobacterium tuberculosis H37Rv
tgctgtaattgccggagatgaacgcgccggtgttgacgttgcccgtgttggccacacccgtgttgtagtcacccgcgttgaagtagcccgtgttgtagtcaccggagttgaagctgccggtgttgtgatcgccgaggttgaagctgccggtattggtgctgccagtgttgaagctgccggtgttgatgctgccggtgttgatgctgccggtgttgccgacgccggtgttgacgttgcccgggttgaacaggcccgtgttggtgctgcccgtgttcccgaggccggtgttgaagctgcccgagtttgcgatgccgaagtttgcggtgccggtgtttccgatgcccacgttgccggtgcccgagttgaagaatcctacgtttccgtcaccggagttgaacaagccgatgttgtggct

SEQ ID NO: 1866 - DNA, 401 bp, Mycobacterium tuberculosis H37Rv
gagttaaagaagccgatgtttccgtcgcccgagttgaacaagccgatgtttccgctgcccgagttcagagcgccgatcccgatttggccggtaccggtgagcccgatgccgatattgttgctgccggtgttggcaaagccgatattgttgctgccggtgttggcaacgccgatgttgtagctgcctaggttggcaaagcccaggttgtcgtcgccgaagtttccgaagccgatgttgtagttgcccagattcgccacgccgacgtcaaagatcccggtgttgccgaagccggcgttattgctgcccaggtttgccagcccaaggttcagagtcatcgtgcccataccgtcgcgcatgagaccggaggcaaaggccggcgtcacgaggtccaacgcgctcgc

SEQ ID NO: 1867 - DNA, 401 bp, Mycobacterium tuberculosis H37Rv
tccgtgaagctggcggtgatcggtatgtgaatcgggatattcacgtcgacgctcacaatcgggatttcgggaatgtcgacgccgatggcgaggtcgatcagaccctggttgtcgccccgccacagaaggccgttgctgtggttgccggagatgaaagcgccggtgttgatattgccggtgttcgccatgccggtgttgtaagtcgccggtgttgaagtagccggtgttgtagttacctgcattgaagccaccggtgttgacgctgccggtgttgacgctgccggtgttatagctgcccgggttcaagctacccgtgttgaggtctccggagttgaacaagcccgtgttggtgctgcccgcgttcccgatgccgaagtttccggcgcccgagtttccgatgc

SEQ ID NO: 1868 - DNA, 401 bp, Mycobacterium tuberculosis H37Rv
gcgaggtcccgcaatttactgcagtgacgcgcttctgcaacggcccgcataatcggagaatggcgttgttgccgtcgacggtcgtgggagtcttgctggccgcgggtgcgggccggtggtatggcaagccgaaagtgctggttgacgggtggctggacaccgcggtcggggcgttgcgcgacggtggttgtaacgacgttattttggtgctgggtgctgtcgaggtgtcggcaccggccggtgtcaccgcgattaccgcgccggactggcagcaggggctgagcgcgtcagtgcgtgcgggtctggcccaggccgaccgcgagcacgccgactacgccgtcctgcatgtgatcgacacgcccgatgtcaatgccaaggtggtggctcgagtccttggccgt

SEQ ID NO: 1869 - DNA, 400 bp, Mycobacterium tuberculosis H37Rv
cgagcgcgcgtagcgggggagttagggtccgctaccgttgttgaggatgccggagagtcgggctccgtggttgccgaagccggagataagggcttgggtcgcgaggtccagcatgctcgtgttgtagaaaccggagacggtattgcctaggttcgcccagcccgacagcaggttgccgaagttttggaagcccgaattcctacgccgccagcattgaagaagcccgaagtctcggtgaagacgtttcccaggcccgacacggcggctgcggcgtcgttgaggaagcccgatgcgccaccggcgccggagttgaagaagcccgacgacggggttgtggtcgagttgaagaatcccgggctctgctgccagccgaagccgaaggggaacgcgcccacggtgc

SEQ ID NO: 1870 - DNA, 400 bp, Mycobacterium tuberculosis H37Rv
catcgatttcgtaggggccgagatgttcggtggtgatgggtatggtgaccgagacatgctttacacaccccttgaaagggatgtagatcacgcagaccgacacccgcaacttgatgggtatttcgaattcgtcaatagtgaacgcgtcctgggtgatggcgttgatgtcgccctcgatgggtatttcaatgttggaacctgtcgtagctccacgggatttcggaaacggcgctctggtaggcgaaaccgcctaggccctggtagtcgccccgccagaagaagccgttgctgtagttgcccgaattgaaggcgccggtgttgacatcgccggagttggcgatgccggtgttggagttgcccgggttgaagtagccggtgttgtagttaccggggttgaagc

SEQ ID NO: 1871 - DNA, 415 bp, Mycobacterium tuberculosis H37Rv
ccgatgttgtagttgccggtgttgccgataccgatgttgttgacagccgccgttagccccggaccggtgtttgcgatcccgacgttaaagtcgccgatgtttgcgccgccgatgttcgcgttgccaatgttgccgaagccgacgtttgaattgccgaggtttgcactgccgaggtttgcactgccgaggtttgcactgccgaggtttgcactgcccacgttgaattggccgaggtttgccaggcccgcgttgaaggtcgacccgttcgggccgcggagcacgccggtcaggtcggcgccgacgttggagagtcccgagaggttagccggcgtcgcgaagtccgccgcactggtgttgtagaagcccgagacggtgttgcccaagttcgcccagccggattgcagcgagccgaagt

SEQ ID NO: 1872 - DNA, 401 bp, Mycobacterium tuberculosis H37Rv
tgcatggtggcgatcgtggggtccagttgggcgagtagttgccgctgtgtggtgtccatgcgttcggtgtcgtcggtgaggttggcaaggtcctcggtgagcttgtcgacgttatccatgctgttcaacaaggagcgcatcgaccagcagatgggaatgtcgaagcagtggcgctcccagtacgtgaaacttctgagggggcgccagaagtcgtcgaaatcggcgattcgatcgcgtagttcgttggcgttgtctcgcatctgcctggtatgagcgttcatatcatgggtggcatcggttagctgtcgcgtcagctcctgggttcgctgggtgatgtcgatcatgcgttgcagttgatcggtaagggtggatagatcagccacgcggtccttgaggttctg

SEQ ID NO: 1873 - DNA, 400 bp, Mycobacterium tuberculosis H37Rv
tcgcgtcgatccgctggaaatcggctacgtcgaggcccacgggaccggaacgtcgttaggggataggatcgaggcgcacgccttaggcatggtctttggtcgcaagagaccgggatctgggcccctgatgatcgggagcatcaagccgaatatcggccatctggaaggtgcggctggcatcgccggattgatcaaggcggtgttgatggttgagcgtggctcgctgcttccgagcggggggtttacggagccaaatccagctatcccattcacggaattgggcctgagagttgtagacgaacttcaggagtggccggtggtggcgggtcggccgcgccgggctggggtgtcatcgttcggctttggcggcaccaatgcgcatgtgattgtcgaggaagct

SEQ ID NO: 1874 - DNA, 440 bp, Mycobacterium tuberculosis H37Rv
ggcttcgccggcgtacttgccgaccagttgcagattggcggcggggtcggtaccgctgcggatttgcgccaacgcgattcgcatgcgcgccagcctaggcccggcgacgagcgcgccgcaccggcgcgcgcaggagccgggcaatccagcttgcgcccggcgacgagcgcgccgcaccggcgcgcgcaggagccgggcaatccagcttgcgcccggcgacgagcgcgccgtaccggcgcgcgcaggagccgggcaagctggcacctcagacgttgttcgtgatccacagcgtggtgaagcgctgttcgatggtcactagctggcttaattgggtgccgataagcctctccagcttcccgccaatgaacgggatacgcacctggatggtgacctgcagcgtcattcgggagccacccgactccggtatgggcgagagcacg

SEQ ID NO: 1875 - DNA, 400 bp, Mycobacterium tuberculosis H37Rv
atgcagagcgcgcagcgcgatgagaaggagttgggcggttaggtcgagcccgacgacgatgcagagcgcgcagcgcgatgagaaggagttgggcggttaggtcgagcccgacgacgatgcagagcgcgcagcgcgatgagaaggagttgggcggttaggtcgagcccgacgacgatgcagagcgcgcagcgcgatgagaaatagcactcgtggaggtcaagacgcccgccggtgatgggctggtggcgctcaccccgttccggactcagaaattcgcgatcacaatttgcgcgttcaagtcattggcatgcatgtgatggtttagcgttccgctgtgcctcttcaggtgtttgtcggcttcgttgccatgatgacgctcaaggtcgcgatcggcccgcaa

SEQ ID NO: 1876 - DNA, 400 bp, Mycobacterium tuberculosis H37Rv
aggtgggggcaccacccgcttgcgggggagagtggcgctgatgacctgcgccgacgacgatgcagagcgtagcgatgaggtgggggcaccacccgcttgcgggggagagtggcgctgatgacctgcgccgacgacgatgcagagcgtagcgatgaggtgggggcaccacccgcttgcgggggagagtggcgctgatgaccagtgtgttgattgtggaggacgaggagtcgctggccgatccgctggcgtttctgctgcgcaaggagggctttgaggccacggtggtgaccgatggtccggcagctctcgccgagttcgaccgggccggcgccgacatcgtcctgctcgatctgatgctgcctgggatgtcgggtaccgatgtatgcaagcagttgcgcgc

SEQ ID NO: 1877 - DNA, 401 bp, Mycobacterium tuberculosis H37Rv
ggcgctcaggcgcgggccgcaggagcagtgtttgtcgacccgatcgccgaccactggtttgtcgacaggcccgagctgatcggcgcggatggcgtgcatcccaacgatgcgggacatgagtatctggcggacaagatcgcgccgctgatcagcatggagttggttggatgagttgggagtcacgagccacgcaaagggtttagcgtgacgacggtcgacgtgctagtcctctgcgtgccgttcgtaatcccaacgctcaaggcgcgcctgcaactgcaggagaccaagtccggcgagtggcgccgcggcggtgaggaaggccagcagcatcggactcatctcagaacctccaaaaccatttcattcgtaccacgttcgtcgtcgaggggtggttctttcgc

SEQ ID NO: 1878 - DNA, 400 bp, Mycobacterium tuberculosis H37Rv
gatcaatgcgcccaccctcgcgttgttggggcggccgctgatcggcaacggcgccgacggggcggccgggaccggtcaggccggcggggcaggcgggctgttgtacggcaacggcggtaacggcgggtcgggtgcggccgggcaggccggcggggccggcggcgccgccgggctgatcggccacggcgggaccggcggggccgtcaccggggtcagcaccaccggcgggccgggcggtcacggcggtgacgccggcctgtacgggtttggcggggccggtggcgcgggtgggttcggccagagcggggcggccggcggggccggtggggccggtgggtggttgtacggcgacggcggcgacggcggcgcaggcgacaacggcggtaacgagtccggcacc

SEQ ID NO: 1879 - DNA, 400 bp, Mycobacterium tuberculosis H37Rv
gggtcgggtgcggccgggcaggccggcggggccggcggcgccgccgggctgatcggccacggcgggaccggcggggccgtcaccggggtcagcaccaccggcgggccgggcggtcacggcggtgacgccggcctgtacgggtttggcggggccggtggcgcgggtgggttcggccagagcggggcggccggcggggccggtggggccggtgggtggttgtacggcgacggcggcgacggcggcgcaggcgacaacggcggtaacgagtccggcaccggcgtcagtgccgttgggggtgtgggtggggccggtggtgctggtgggttgttgttcggtaacggcggcgacggcggcgtcggcggcgacggcggcgacggcagcagcacccaggattccggtg

SEQ ID NO: 1880 - DNA, 400 bp, Mycobacterium tuberculosis H37Rv
gggggtgccggtggggccggtggtgcgggtgggtggttgtacggcgacggcggcgccggcggtgccggcggcggtggtggccgcggcggcaccggcaacgatggtggcgacggcggggacggcggccgcggcggtgatgcccagctgcttggcaacggcggtgacggcggggccggcggggccggcgggcccgccgggttggcgcttcccccggggccggcgcggccggcgggggcggcggtgccggcggttcgctgttcggcagccccggcacgaccggcccgcacggctgatccctggctagcgccgatcttcgcgcgctcaacccttcggcattcgcaccacctgggcggcatagctcagaccggcgccgtagccgatcaacagggccagatcgccg

SEQ ID NO: 1881 - DNA, 401 bp, Mycobacterium tuberculosis H37Rv
cgtggggcatgttaagcgctcaacagggcggcgcgcccacctttctccaagccccgctggactcagccgatggcgtgagccgagggccaggcgcgtgccaatctttcgtcggtggtcaacaacaccagacctgccgtttcggccagctcgacgtagagggcatcggtcaggcggagggtgtcgcggcgcgaccacgctccagcaagcagcgacgaaagaccgtgtcgagtcaccggcacctgtcgcaactcctccagtgccgcatcgacataggcaacggtgagtgcgccggcgcgctgcatgcgccccagcgccgacaacacctctgcatcgaagtgcgccggcgcgtgcatcgcggtccgagccagccgcgcgcgcaccgcagagcaccgatcgctagt

SEQ ID NO: 1882 - DNA, 401 bp, Mycobacterium tuberculosis H37Rv
gggcttttatcgtgacgagctgatcgccgagatcgctcagcgtggcggagtccgtggctatccgcggctgcctgctgaggtgcgggccgcgttcccgaccgcggcggagatcgcgccgcagtggcatctgcgcatgcaggccgcggtgcagcgccacgtcgaggccgccgtgtccaagacggtcaacttgcccgccacggcgacggtcgatgacgtccgcgccatctatgtggccgcctggaaggcaaaggtcaagggcatcacggtgtatcgctacggcagccgggaaggacaggtactgtcctacgccgcgccgaaaccgctactggcgcaggctgacacggagttcagcggcggctgtgcgggccgctcctgcgagttctgacggcggctcccatggc

SEQ ID NO: 1883 - DNA, 400 bp, Mycobacterium tuberculosis H37Rv
ccgcgcccaaaggtcacattgccggcgacaaaccgtgcctacctggcggagaggtgcccgtcggcggtggtcaccaggtgtagtcgggcagctcgaagtcgtcacgcacgctgccggcgaacagcgtcgccagcgggccgaagttcatcgtgcgcatcgcaacgttgcgaaaccacaggccgaatcgggttcgggtggcgaaaaaccagatgaacttcgccgcactggcttgcttgccctcgatgaagggacgcaggcgcttctcgtaggcgtcgaaggcgcgacggtggtcgcccccggcgcgggcgagctccccggccagcacgtaggcctcggtgatcgccaggccggtgccctcgccgccgagcagcgagatgcacccggccgcgtcgccgatcag

SEQ ID NO: 1884 - DNA, 400 bp, Mycobacterium tuberculosis H37Rv
accgggaccatgcgataggtgaggtcgtcaacaacttgaacaccgtgctggccaccaccgtcaagcatcaaacggaattcgaccgcacggtcgacaagctagaggtgctgatcactggactgaagaacagggcggacccgctggccgcggcggcggcacacatcagcagcgccgcgggaaccctagccgacctgctggggcggatcgtccattgctgcacagcagcttcgggcacctcgagggcatccagcagccgctcatagacgagctggcagaactcgaccacgtgttgggcaagctgccggacgcctaccggatcatcggccgcgccggcggcatatacggtgacttcttcaacttctatctgtgtgacatctcactgaaagtcaacggattacag

SEQ ID NO: 1885 - DNA, 400 bp, Mycobacterium tuberculosis H37Rv
ctccgcccgccgcccgggtacaaggacaccactgtcccagggatcttctcgcgggacacaccgttttcacacggcaaccatgaaccgggctgggtcgttgcgcccgggatgcagggtatgcaggttcagccgtttaccgcgaacatgctcaccccggaatcgctggcagagctgctgggtggtccggatattgcccccccgccgccgggaaccaacttgcccggaccgccgaatgcgtatgacgagtccaatccgttgccgccgccgtggtacccgcagcccgcgtccctcccggctgcgggcgccacaggacagccaggcccgggccagtgaggtgcggcgtgagcgcgggtagcgcgaacggcaagccgaaccgttggaccctgaggtgcggcgtgag

SEQ ID NO: 1886 - DNA, 400 bp, Mycobacterium tuberculosis H37Rv
tatccgctccggggcacggacgctgcgaggtgatctgcttttcggccgatcacaccggttcgttcgcgggcctggacccggcgcatgcccggctggtcgtgcacgcgtggcggcaccgcaccgccgaattgacggcgctgcccggggtagcgcaggtgttctgcttcgagaaccgtggtgaggagatcggggtgaccctgcccacccgcacggccagatttacgcctatccgtatctgacgccgcgcaccgcggcgatgctgcgccaggctcgtcggcaccgaaagcgtcacggtgacaacctgtttgccagcctgctggcacgcgaggtcgccgacggcagccgcatcgtggtacgcggcgagctgttcaccgcattcgtaccgttcgccgcacgctgg

SEQ ID NO: 1887 - DNA, 401 bp, Mycobacterium tuberculosis H37Rv
accggccgcgcagatcgcccccggccagcggcatctcgaagtccaactcccgcagacgatcacgcacaccgatctgccgcaatgtcagtgcggcggcggcgggtcccagcggcgtgtcgtgcatcggcagcaacgctcgggccagttcgggagccagctgcgcgtggtcgacgtccacggtccaccacggcgcgtgccggcgcacctgggcttccagttcggcagccagatcgggagcggctgggtccgcggtctcgagcaccgcgtgcaccagcgagccgaacgacgcccccgacggcagcgcggccagcggtgatgtcagatcggcgccggaaccgggcgcggcgacgacggcgatctccacctcgtccgcacggccgccggccgccggctcgctggtg

SEQ ID NO: 1888 - DNA, 409 bp, Mycobacterium tuberculosis H37Rv
aacgagaaccggacgtcgtaggcggctgtgcgaccgaagttgcggactaccagctcgatcacgtgccagtccgcgacgtggggctccataaacatggccacgtagggccgagtctgctccgcagccagtcgacgattgcgttggatttgccgcttggtcaccaccagggcgaccacaccgagcccaagcgccgcccacgcggcccacgccaaccaggtgccggagtcgacgccggtgacctcatgccagctgctcaggacccaccccatggaatccaccatccgcttataccacagtgacatcggaccgagaagttagctgacaggatcccagaggcgcctgggcactggtcgctggctgccgaatcgttggcggaagcgccgctggacacgtcgctggacccgggccg

SEQ ID NO: 1889 - DNA, 400 bp, Mycobacterium tuberculosis H37Rv
agcttcgaccggcagcggtacccggtcaagcttggccacctcgcggtgtgtggtggaacccatctgagcagtgtgccaaaccggggcagacagctcccaattgacgtgagcccgctcacttgctgggtaagcgtcgccgaatgtgtaatgagggcggaaatccggcccgatttccgccctcattacacattcggcgacgcgtggactacctcaagccgtactgggatacccacccgcaggaccgcgccgacctgcgccggttcctcgccgatggccgtatcgaagtgatgggcggaacctacaacgaacccaacaccaacctcaccagcccggagaccaccatccgaaacctggtgcacggcatcggttttcagcgtgacgtgctgggcgccgagccggc

SEQ ID NO: 1890 - DNA, 401 bp, Mycobacterium tuberculosis H37Rv
cacgttgggcgacggcgccaacgggctgccactggccgtgtgcaccacgacggctcacacgtgccacacttcccatactcacccatcgcggtggaccccaaacccagtgccggccaccaagggcgtccccgctggattggtgcaagcaaccttcatcatcgaaaaccttgaccccggcaacaacgacacgccgaccccccctacacccaaactgcgattagcccgaaaacctgggcaccataggcgatctgaatacgatgcggattcggtgctgcggagaaaggatacatcgcgccgatgcgtccaggcggatgacgtccgatgcgtgcagctggtccaggatccgcggcgcggacgtgtcgaactcggtggttaccgcgccgagcttactgttggccgac

SEQ ID NO: 1891 - DNA, 400 bp, Mycobacterium tuberculosis H37Rv
gtgaacaccgcgaaccggcagggcaagcgtaaacgcacccggaccggatacggcaagcgcaagagcaccaagcgcgccatcgtcaccctggcgccgggcagcaggccgatcgacctgttcggggcaccggcctagcccggcgacgatgcagagcgaagcgatgaggaggagcagggcaatgcggcctagcccggcgacgagagcgtgagagaaagacctgattagacatggcaattcgcaagtacaagcccacgacgcctggtcgtcgcggcgccagcgtatctgatttcgccgagatcacccggtcaaccccggagaagtcgctggtgcgcccgctgcacggtcgcggtggacgcaacgcgcatggccggattaccacccggcacaaaggcggcggtca

SEQ ID NO: 1892 - DNA, 400 bp, Mycobacterium tuberculosis H37Rv
ggcgaatctggcgtagatttcggcggggtggccacctagcggcgccgccgcaccggtcgaggccaccgcttccatggccaggcccacatcttgatcggcgtggtggccacgcccggtgtgaagtgctgttggccgtgatgtcggattacagtctcggcgtgcccgacgagacaggccttggtgctgacgcggcgcgcgcgtgaagtggcgctgacacagcacattggggtatccgcggagaccgatcgggccgtcgtccccaagctgcgccaggcctatgacagcctggtgtgcggtcgccgccggcttggcgccattggagccgagatcgagaacgcggtggcccatcagcgcgcgctgggccttgacaccccggccggtgcccgtaacttctcccggt

SEQ ID NO: 1893 - DNA, 448 bp, Mycobacterium tuberculosis H37Rv
ggcaacgccggatccggggggaccggcgggttcggcgataccgacgggggagccggcggtgccggcggtgacgccggctggttgggctccggtggggtcggcggggccggcgggttcggcgaaaccggtgacgggggtgtcggcggggccggcggcaaggccgggttgctgatcggtaacggcggggccggcggcgccggtgggcaaggcgccgtgaccggcggtaccggcggggccggcggcgacggggtgctgatcggcaacggcggcaacgccggcatcggcggaaccggaccgaccgcgggtgataccggcgcgggtgggatcagtgggctgctgctgggcgccgacggcttcaacaccccggccagcgcctctccgctgcacaccctgaaacaacaggcgctggccgcgatcaacgcgccgacccagacactgaccgggcgac

SEQ ID NO: 1894 - DNA, 448 bp, Mycobacterium tuberculosis H37Rv
ccgacccagacactgaccgggcgaccgctgatcggcaacggcacccccggggcggtcggcagcggggccaccggggcccccggtgggtggctgctcggcgacggcggggccggcgggtccggcgcggcgggctcgggcgcgcccggcggggcgggcggggctgccgggctgtggggtaccggcggggccggcggggccggaggcagctcggcgggtggcggcggggccggtggggccggcggggccggcggctggctgctcggcgacggcggggccggcgggatcggcggagccagcaccgtactcggcggcaccggcgggggaggcggggtcggtgggctgtggggcgccggtggggccggcggggccggtggaaccggccttgttggtggcgacggcggggccggtggggccggcgggaccggcggactgctggccgggctgatcg

SEQ ID NO: 1895 - DNA, 400 bp, Mycobacterium tuberculosis H37Rv
agcgcagggctgctgttcggcagcggcggcgccggcggcgccggcggatttggtttcctcggtggggacggcggggccggtggcaacgccgggctgctgttgtccagcggcggggccggcgggttcggcgggttcggcaccgccggtggggtcggtggggccggcggcaatgccggctggctgggcttcggcggggccggtggcgtcggcggcagcgccgggctgatcggcaccggcggcaacggcggcaacggcggcaccggcgccaacgccggcagccccggaaccggcggcgccggcgggttgctgctgggccaaaacgggctcaacgggttgccgtagccgggcggcacggcatggcttccgggcgtcaaccactcgccggtgatgcagatcggct

SEQ ID NO: 1896 - DNA, 400 bp, Mycobacterium tuberculosis H37Rv
gccggcggtaacggcggggccggcgggctgttcggcagcggcggggccggcggggcctccaccgacgtcgccggcggggccggtggggccggcggggccggcggaaacgccggcatgctgttcggcgccgccggggtcggcggcgtcggcggattctcgaacggcggtgccaccggcggggcaggcggggccggcggggcgggcgggctgtttggcgccggaagggaacgcggcagcggcgggtcgggcaacctcactggcggggccggcggggccggcggcaacgccgggacactcgccactggtgatggcggggccggcgggaccggcggcgctagtcgcagcggcggattcggcggggccggcggagccggcggcgacgccggcatgttcttcggct

SEQ ID NO: 1897 - DNA, 400 bp, Mycobacterium tuberculosis H37Rv
gggctgtttggcgccggaagggaacgcggcagcggcgggtcgggcaacctcactggcggggccggcggggccggcggcaacgccgggacactcgccactggtgatggcggggccggcgggaccggcggcgctagtcgcagcggcggattcggcggggccggcggagccggcggcgacgccggcatgttcttcggctccggcggctccggcggcgccggcggcattagtaaaagcgtcggggacagcgccgccggcggggccggcggggcccccgggctgatcggcaacggcggcaacggcggcaacggcggcgcgagcaccggcggcggggacggtgggcccggcggggccggcggcaccggcgtgttgatcggcaacggcggcaacggcggcagcggcg

SEQ ID NO: 1898 - DNA, 409 bp, Mycobacterium tuberculosis H37Rv
gttcttcggctccggcggctccggcggcgccggcggcattagtaaaagcgtcggggacagcgccgccggcggggccggcggggcccccgggctgatcggcaacggcggcaacggcggcaacggcggcgcgagcaccggcggcggggacggtgggcccggcggggccggcggcaccggcgtgttgatcggcaacggcggcaacggcggcagcggcgggaccggcgcgaccctgggcaaggccggcatcggcggtaccgggggggtgctgttgggcctggacggctttacggcccccgccagcacctcgcccctgcacaccctgcagcaggacgtgatcaatatggtgaacgaccccttccagacgctcaccgggcgtccgctgatcggcaacggcgccaacggcactccg

SEQ ID NO: 1899 - DNA, 401 bp, Mycobacterium tuberculosis H37Rv
ataacgcgggatccacgttttgccagtggtcgatttcggcgcgtggcaccaccaaggtgtggccttgcgtcatcggctcaatcgtcaagaacgccacgacgtcgtcgtcctcgtagacgaaacggccgggcagttcacggttgatgatcttggtgaagatcgacacccgttgagcatatgacgtcgcaacggcccccccccaggtttcattcctggttaccgaaggtcatcatgtcgaggttccagtacccacgcatgttggtgatcaaaccggccttattcacccggtaggtgaacacgccgcggacctcactggtaaagccgccgtcaaactcgctgtgcaacaccagaatgtgggcgatctcgtccggtgagctggacgggaacgtctcctcgcaggt

SEQ ID NO: 1900 - DNA, 400 bp, Mycobacterium tuberculosis H37Rv
gaacgtggaagctgacggccacgacttcttcgcactgggcgcggccagcgtcagcctggacgataacctcttagcgtattccgttgatgtcgtaggtgacgaacgatataccttgcggttcaaggatttacgcaccggagaacagtacccggacgagatcgccgggatcggagcgggagtcacctgggcagctgacaaccactgtctactacaccaccgtggacgcggcctggcgtccggacacagtgtggcgataccgactagggtccggcgaatcgtcggagcgggtttaccacgaagccgatgatcggttctggctcgcggtggggcgtactcgcagcaacgcctatctgctgattgcggcggggtcgtccatcacttcggaggtccgttacgcgca

SEQ ID NO: 1901 - DNA, 401 bp, Mycobacterium tuberculosis H37Rv
ggtttgttcttggtcaacagtcccgagcagcgccgcttgggcatccgtgatagccatgagcttgctctgcaggattggctggggacggcggcgttcgaccggcccgaggactactggcccgaacaatgggcgcatgcttacgtcgatttcgcggcgggggagaagcgcagctggctgcgggcccgcgggctgaagatctttccgctggtgggctgggccgagcgtggtggttacgacgcgcaggggcacggcaactcggtgccccgtttccacatcacctggggtactgggccggctctggtcgacatattcgtgcgtcagctgcgtgatcgccccacggtgcgctttgcgcaccgccaccaggtcgacaaactgatcgtcgagggtaacgcggtgacagg

SEQ ID NO: 1902 - DNA, 401 bp, Mycobacterium tuberculosis H37Rv
acgtcgccggcggcatagagccagccgtcgtcaacagcccgcactcggcaggtgtcatcgacgtccagccagctgcccggcgtcagtcctattgtctccaagccgatgtcgtcggttcgcggtgctcggccggtggcgaagagtacctcgtcgacccgcagctcggtaccgtcgtccagctcgaggaccactgggccagttgggttggggcggcccagcgcgcgtaccgatactcccacgcgcacgtcaacgccggcgtcggccagtccgcgaccgatgagttcccccacaaacggttccattcggggcagcaggccagatccccgagccagcagggtcaccgaggcgcccagtccctgccaggcggtcgccatctccacaccgacgccgccggcgccgac

SEQ ID NO: 1903 - DNA, 400 bp, Mycobacterium tuberculosis H37Rv
ttggggccggtggggccggtggagccggcgggtccagcgggattggcgggttcgccgcgggcggggccggtgggcccggaggggccggtgggctgttcaacggcggcggggccggcggggccggcgggtccggcgtcagcggcggggctggcggggagggcggggccggcggggccggtggcctgttcgccggtggcggggccggcggggccggcggatcgggcaacaacgtcgggggggccggcggggccggtggggtcggtgggctgttcggggccggcggggccggcggatccggcggcggcggtagcgttgctggcgacagtggggccggcggcaacgcgggcttgctcgcccccggtctcgccggcggtgccggcggtggcggcgggcagggttt

SEQ ID NO: 1904 - DNA, 409 bp, Mycobacterium tuberculosis H37Rv
gagtttagcaactactcatccagaagccggccactacggcctggccacctggtttacccgcatggacgcgatgaccgcaccgacctgagtcggcattgctggttgcgctcatccggttatggcaagccgttctgtcccggcgcgccaaacaccccggccttgccaccggtaccgccggctccgccgttgacgccgttgccgccgttgccaccgtagccgagggtagacggggcgagcatgccgttgacaactatcgtcgtgtcgccgccgttgccgccggtgttagccccgaagccggtgccggcgttgccgccgttcccacccacgccgactagtccgagggcgtcgccgccgttgccgccagcgccaccgttaccggtgggggcggcgccgccggcaccgccggcac

SEQ ID NO: 1905 - DNA, 534 bp, Mycobacterium tuberculosis H37Rv
ccaccggtaccgccggctccgccgttgacgccgttgccgccgttgccaccgtagccgagggtagacggggcgagcatgccgttgacaactatcgtcgtgtcgccgccgttgccgccggtgttagccccgaagccggtgccggcgttgccgccgttcccacccacgccgactagtccgagggcgtcgccgccgttgccgccagcgccaccgttaccggtgggggcggcgccgccggcaccgccggcaccgcccacggcgatcccaaccgctacggcctcgccgccgtcgccgccgtcgccgcccatgccgcccagcacccccagggcgccaccaccgtcgccgccggcgccgccgatgccgatgcccaggatcacgggtgagctcaacccgccaccgccaccggcccccccgttgccgccggtcccggtggcggtgccgccagctccgccggcgccgccgtgcagcacggagaaccctaggaagtttgcgatgccagcgccggcgccgccgaagccgccggctccgccggtggcg

SEQ ID NO: 1906 - DNA, 400 bp, Mycobacterium tuberculosis H37Rv
catcagtgcggcgatccggcgaattgtgcctggccgacatgggcaccgacttcgacgacttttcttcgcgggcgacagcgtttgcaacgcagggcgtcagtgctgaggcccaggccaaccgtgcccacctgcgagccgccatgcaggccggggggttgacggtgtactccggtgagtggtggcatttcgacggccccggcgccggcgtcgatcgcccgattctcgaagtgccagttgactgacgtctcatatagtgaaataaatgtccactatttgggcgcagtggcggtaggctttgagccgaacacctcgaccatgggaccgcacggtgaacgacaaacgtcgggcgatttatacgcacggatatcacgagtcggtgctgcgcagtcaccggcgacgc

SEQ ID NO: 1907 - DNA, 401 bp, Mycobacterium tuberculosis H37Rv
ccagcaggccgcgcccgctccccgattttcccggacaccggccgggccggtcaggccgccgccggccgcagccacaccgatcgacgaaatcaactggtaaccacggtggctgccgaacaccgcccaccaacggcgcggcgttgctagcgtgaacgtcagtggccgtaaaagcatcgcgggaatttgtcatcgacgcgccttccagaagtggtgatggaggcgctggcagatgtcggcgtcctggcttcgtggtcaccgctgcacaaacaggtggaagtgatcgactactacccggatggccggccgcaccatgtgagggcaaccgtcaagattctggggctcgtcgacaaagaggtcctcgaatatcactggggcccggactgggtgtgctgggatgccga

SEQ ID NO: 1908 - DNA, 440 bp, Mycobacterium tuberculosis H37Rv
ggcgaacggcgcgatggcggcgcgtgcagcgccggccagttcatggtcgacttccaacagcaccgtcttatcggactgcactatcaatggtccgtcagtcaatggcgccgctcctcctcatcgctgcgctctgcatcgtcgccggcggtagtcaatggcgccgctcctcctcatcgctgcgctctgcatcgtcgccggcggtagtcaatggcgccgctcctcctcatcgctgcgctctgcatcgtcgccggcgcgggggtcatgggctccattatcggtcgtgggccgacaccaccaacgtgatgcggtggatggcgaagtcacgcagtcgcccggatgacgagtcgaacgccaccagctggccgccccgtagcgtgatcggtgcgaccacccgctgagtggcaacgccggcggcatcgaggtagctgatcaccaaggtg

SEQ ID NO: 1909 - DNA, 401 bp, Mycobacterium tuberculosis H37Rv
accatgcggtgagcgaactcgtgaccgaccgcacgggtgcgctatcacccttcggtgaattgacgttcccggtaccgtccgacgacctgccctacatccacccggtgaccgtcatcaatcggtaagccgccaggatggccagggcttctggggcatccgactaccgctcgggcgagctgtcgcaccaggatgagcggggggcagcgcacatggtcgatatcaccgagaaggcaaccacgaagcgaacagccgttgccgcgggcatcttacgtacctcggcgcaggtggtggcgctgatctcgactggcgggctgcccaaaggggatgcgctggccaccgcgcgggtggcgggcattatggcggccaagcgcaccagcgacctgatcccgctgtgccatcaa

SEQ ID NO: 1910 - DNA, 630 bp, Mycobacterium tuberculosis H37Rv
gtcggcgggcgcgggtggcgccaggtcggcggacgcgggtgccagatcggcgggtggcgccagttcggcgggagctgccgggaggggttcacccagcggcgcgggcaggtcgtttacggcaagttccacgggtggtgccaggtcggcgggcgcgggtggcgccaggtcggcgggcgcgggtggcgccaggtcggcgggcgcgggtggtgccaggtcggcgggtggtgccgggtcggcgggagctgccgggaggggttcacccagcggtgcgggcaggtcgtttacggcaagttccacgggtggcgcgacgtcggcgggcgcgggtggtgccaggtcggcgggtggtgccgggtcggcgggagctgccgggaggggttcacccagcggtgcgggcaggtcgttagcggcaagttccacgggtggcgccgggtcggcgggcggcggggccagcggtgctggttcgccgttgaccgcggccgcgtccaacggagcgtccatcgctgccgaagcgggaagcacttcgcggggtgttgcgttcgataacccgcggccgcacaccggccaggcgccgcgaccctgggtggccagcacccgctcaccgacggcaatctgctgctcccggctggccag

SEQ ID NO: 1911 - DNA, 400 bp, Mycobacterium tuberculosis H37Rv
atcgcaagactgctcgccgggtcgccgaggttgtccgggcggtggcgcgggagttcgagtcctaacggggtcgggtggtgcgctggcccaattgcgccgagctggcaacgccgcgccgttccagggtcacggtcggatcgattccgccgcactcggtttgacgagacgacgaccggctagcagttagccgggttggccggcgctgcccgggctgccgcccatgccgggattgccgtcggtggttttcccgtcgccgcccgtgccgccctcaccgcctgtgccgccggcgccacccgcgccgcccgctcctccggcaccaacgccaccgtcgctgcccgcgcggccaatcagcccgccggacccgcccttgccgccgagggcgccgggggcgccgccgttg

SEQ ID NO: 1912 - DNA, 403 bp, Mycobacterium tuberculosis H37Rv
caccggcgccgccgttgccgatgagcagcccgccagcacccccgttaccgccctggccgccgataccgccttcgccaccggtgccgagggcgctcgcgccgtcaccgcccacaccgccatcgcccccgaacgccttgcgtgaactgccggcgctgtcggtgttggcggcaccgccgtcgcccccggcgccgccgccgccgccgggggcaccgctaccaccggtaccaccgactccgcccgcgccgccggcgccgccgtcgccgatcagcagcccgccgcggccaccggcgcccccggttccgcccgctccgccggtaccgccggaagcgaagctgtcgaagccgttgccgccgctgccgccgttaccggcttccgcgttgctgggagaattggtgcccacctg

SEQ ID NO: 1913 - DNA, 401 bp, Mycobacterium tuberculosis H37Rv
tcggggtatgtggtaacgaactgtccgctgacgggcatgttgtcgataggcaatacggctgtggcgcccattccgacaccactgcgccggccggtggcagcacacccatttatgagccgtacgacgacggtgtgctcgacatcatcgagaagccggctgaatcataggttttctctcacccgctgttccctacttttttttgggggggggcaccagtcgaagaaacccgactgattatcacccgtattgaacactcccgagctgttgtcgcccgagttcgccacacctgaagtctggagggtgcccgtattggccaagcccgaggtgaatctgcccacgttgaagaagcccgagttaacgcggtgcctgcattctggaagccggagctagtgtcgctcgcg

SEQ ID NO: 1914 - DNA, 400 bp, Mycobacterium tuberculosis H37Rv
gtcagcgggtcgacccgaccgggcccatgagattgcacccatggtggcggctgtaattccccgcagcgcccggctaatggtgctagggggcgagccgaggcgatcaaaccaccgagtgttccggccgcgttggctactatctgcggccatgaccaaacgagcggcaacggccgccatggtgatgttgctgacgttaacggttgcggatccacgcaccaggcacttggcccgccgtccgggttgcccgatgcctctcccaatgagaggtcagcgatacagatccccgctggccgcatcgacgatgccgtggcaaaggtcgacggcctggtcggcgagctgatgcagaataccggcatacccggaatggcagtggcgatagtccatggcggaaagacgttgt

SEQ ID NO: 1915 - DNA, 401 bp, Mycobacterium tuberculosis H37Rv
agtccgggtgtcctgggccaactcaccgactttcgatccacgcgaacaaagatgcgagagtaaccgaaattcgcccgccaccaaccaccgggctactcgggacctccgctggctatcggtagtcggggttggcgaagtccggccggcagccggcgtcccacttggtgcgttgattgccgtaggccgggatgccgccggcgacccgcaacatctgcgcgatgtgcatcagattgaacgtcatgaatgtggtgttgcggttggtgaagtcgttctctggaccgccggatccggggtcgagatacgacggtcccggccccgcttcaccgatccagccggcatccgcttgcggcgggatggtgtatcccaggtgttgcaggctatagagcacattcatcgcgcaa

SEQ ID NO: 1916 - DNA, 400 bp, Mycobacterium tuberculosis H37Rv
ctgtccgctgccaggggtccggccacggtcgcggagtccccgggcgaccatcgggcagcacccggggtcggtgggccggtgcccgccccggcaatgccggactcggactggctcaagcccgtatcggccggagtggccagcaaggttgcgttgtcaccgcgccgcagaatcgtcgtggcctggtgttgctcggatgtggtgagtgcgtcatgggcggcgatggccagatcaccagcgctcataaagcgctccgcggggtttttggccatgcctttggcgatcacctgatccagggccggcggcacgcgcccgggccgtagctggctgggctgcggggcagggtccattagatgcgcggcgatcaaccgctcaacgctgtcggcccgatacggtggggcac

SEQ ID NO: 1917 - DNA, 400 bp, Mycobacterium tuberculosis H37Rv
cctgcgccgatggcgtgtgaacggctcggcggccagagcggtgctgctgatgtcgacgccgctgcgccggcgatggcggcggtgaacctcaccctgggtttcgctggcaaaaccgtgctcgaccaggtgagtatgggctttcccgctcgtgcggtgacgtcgttgatgggaccgaccggttcaggtaagacgacttttttgcgcaccctaaaccggatgaatgacaaggtctccggttaccgctacagcggtgatgtgctgttgggcggacgcagcatcttcaactaccgcgacgtgctggagtttcgccgccgggttggcatgctgttccagcgcccgaatccgttcccgatgtcaatcatggacaacgtgctcgccggcgtgcgtgcccacaaactgg

SEQ ID NO: 1918 - DNA, 428 bp, Mycobacterium tuberculosis H37Rv
tttaccgcacccgaaggcaagacgatgggccacgccggcgccatcgtctccggctcgtctggcacagcggcggccaagcaagaggccctggaggccgccggtgtgaaggtcggcaagaccccatcggcgaccgcggcgctggcccgggagatcttgctcagtctctagggcgagcagacgcataagcccccgcacgctcggcgtgtcgggggcttatgcgtctgctcgccctatacgcaacaggccaacttggcggccagccgctccacgtacgcggctgcgtcgtctgcagacctgtccggcataccgaacagcacctccgtaacgccaagctcggcccagcgcgccagcttgtcgggcaccggtttgacgtccagggccacgatctgtggaagcccgtcgcggccggcggccgcccagatgtcttg

SEQ ID NO: 1919 - DNA, 401 bp, Mycobacterium tuberculosis H37Rv
ttggccagttcggcgttgatctcgtcgagcttgccgctcatcgtcgcggccgcctcgtcgtaggcggaagcgttcgggtccagtgtggattgcagcacggtcacgattgataccccagggttttggcggccaaagcggtcagtatttcggtggtgccgcctccgataccgaggattcgcatgtcccggtattggcgttcgacttcggattcggccatgtaacccatgccgccgaacagctgtacggcctggttggcaacccactccccggcctgcacggcggtgttcttggcgaaacacacctgcgcgatcaggtcggtctcgccggcgagctggcgttccaccacatggtgcgcatagacccgggcgacgtcgatgcggcgggccatctcggccagcgtg

SEQ ID NO: 1920 - DNA, 400 bp, Mycobacterium tuberculosis H37Rv
gctgggccaggaaggtcttcgcgtagccgcgatcggggtttttcatgcggtcgcgaccgagaatcaacatggtcagctcggccaggtagtcgccggtgagatagtccagctcgccgccggtcagcatctcgcgcatggcggagaggcggtcgccgtagaagcccgagcagtttccgatacgcacggcaccacagtcagggccatgcgattcctcccttgggatcggcgacgctaccaaccaaccggtaggttagcactgccctgtttcgcgacggagatcgcttcctgagtcgaagcggcccggtctgcgccgtccattggagtagagtccgtttcgctacgggacgccgggtgctttgccggccccaggaggtcagcgccatgtccttcgtggtcacag

SEQ ID NO: 1921 - DNA, 400 bp, Mycobacterium tuberculosis H37Rv
gcgggagtttgtcgcaccgttcgagtcgccaccgggccggtacccggcgcccgcgtggtgtctgcgccgaccgaagtgtgaccgaattcttgggagcatgcctcgggcggccaggggtatccgcgcgtgccgaggccggtgggtcgatcggctggcgcaccagcatgccagcggtagggccgcaggcatccgccctcgcgaggtcggtggcgcgcatcaaagccaggcgcaaaagccataccatgatgcgacagagccgctcggcgagagcctccgctaccggccagctcacggcgatagctgcatcaacggccatcgagacaacccgtcggcacgggaatcctcgcagttcaccgcggggagtacggcaaaggctgtgaccaagctgtgacatcgccct

SEQ ID NO: 1922 - DNA, 405 bp, Mycobacterium tuberculosis H37Rv
aggctaacccatggctactgcattggggaaattcgatccttgtgagctgctcggatagctgtgccccaaccgtgcggacaattactttgccgcgacgacgaatccggcgatgatcgcctcgatgtcggaagcgtgcttgacggcctcgttggccagactcgtgatggtgagctgcaccaggtagcgctgcttggccggcggtgcgccggttgggaagacgatccggttccaggtgtgcagtcgcctgccgtgcaggtcataactgccctgaatcatcgaggacggaaacccgttgaagtctgccgtcgaggagtccaattcggtgaagttcgtcgacagccgggcatcggcagtgccatgcttgagcgcttcggcgatatcgaagtcccggtgcagcttgaacac

SEQ ID NO: 1923 - DNA, 400 bp, Mycobacterium tuberculosis H37Rv
cggcccgaactcagcgggcaggtcccgccacggacttcccgtacggaaccgccacgcgatcccttccaggataagccggtgatcgctaaaccgtctgccgggcttgccctcatgcgacggcatcaacggctcgaccacggcccagaactcgtccgaaatcacacccactcgcgtcaccggccaatcctcgctggccagtacctaaaaatttgggagacacgccctaggcgcgggctgcagcggtagtactttggcctgttcggcgcatctcctatggctgcggcccgctggctcaaaccttgccttgccacgccaagccattcctagccttgcctagccacaccatgccctgcctagacacagcgagcctacgccgcgtcgagttcggcgaaaatcaaac

SEQ ID NO: 1924 - DNA, 400 bp, Mycobacterium tuberculosis H37Rv
attcgttgcgcggattgatcgggcgacgaaaagatgagtgctggcgcggcctgcggcgcacgggagaacacagggaccaccccggttccatagtcaacgtcagcggtgcgggtgtcgatcagacgacgaatggaatcgccctcgcattcctcgcgatcgagtgcctatgagccgcgctcctgcggcctaggcgagcgcttccggggctctcagacatcggcctcgtggcggtgtgcgcggcggcatgtggctctgtgatctcttgcgcgagcgccgattgcgaatttcgtccggcgaaaagtgaccgctccgtgaccttaatgcaagaggtgtgtggtgtggagaggggcgggaggaagggagtgaggcgacggtgtcgagatgcagcgaggattggtgg

SEQ ID NO: 1925 - DNA, 401 bp, Mycobacterium tuberculosis H37Rv
ggtgcgggtcatggcgggtgccgacgcgcggtgcaagcgcatcgagctgaccgcgaagggccgcgcggcactgcaaaaggcggtgcccctatggcgcggggtgcaggcggaggtgaccgcaagcgtcggtgactggccacgggtgcgacgcgacatcgcgaatctgggtcaggcggcggaggcgtgtcggtgatcttttttgcgcatatatgtgtagttacacccaactgaggagcaaatgatggctaggcagagatttcgtgaccaggtggtgttgatcaccggtgcctccagcggcatcggggaggcgaccgcgaaggcattcgcccgtgagggcgccgtggtcgccttggcggcgcgccgcgagggtgcgttgcgccgggttgcccgggagatcgagg

SEQ ID NO: 1926 - DNA, 403 bp, Mycobacterium tuberculosis H37Rv
cgccggcgccgtcgagtccggcgatcaggccggcgccacccttgccgccgttgccgccgttgccgccgtcaccgaccaactgggcgtcgccgcccttgccgccgttgccgccgttgccgccgttgccgtcgacaccgccggcggcggcgcccagaccgccttggccgccgcccccgccgttgccgccggtgccgccgccgccgagcaggccggcgccgccgccgttgccgccgtgaccgcccgcgtgaccgctgccgccgttaccgccggcggcttgaagcccggtcggcgggttggtgccgccgctgccgccgctgccggcggtgctgcccgttccgccggcgccgccggcgccgccgccaccgaacagcctggcggccgatccgccgttgccgccgttgcc

SEQ ID NO: 1927 - DNA, 400 bp, Mycobacterium tuberculosis H37Rv
ccggcgccgccggctccggcgctgccgccgctaccgccggcgccgccgttgcccgacagccagccggccgacccgccggtgccgccggccccggcgttgccgccgacaccgccaccgccaccgttaccacctagtgcggcgttgagcccggtgccgccgtcgcccccggagttgccggcgccgccggccccgccgttgccatacagcagcccaccgccaccaccggcgccgccgccgccgccgtcgccgccgacaccacccgtaccacccttaccggcggtggccacgacatgttcgccgccggcgccggcggccgcgccgttgccgccggcgccgccgtgcccggcgttacctccgtgaccgaacagcacggcgcctcgtccgccgttgccgccggcgc

SEQ ID NO: 1928 - DNA, 403 bp, Mycobacterium tuberculosis H37Rv
cgccgccgttgcccgacagccagccggccgacccgccggtgccgccggccccggcgttgccgccgacaccgccaccgccaccgttaccacctagtgcggcgttgagcccggtgccgccgtcgcccccggagttgccggcgccgccggccccgccgttgccatacagcagcccaccgccaccaccggcgccgccgccgccgccgtcgccgccgacaccacccgtaccacccttaccggcggtggccacgacatgttcgccgccggcgccggcggccgcgccgttgccgccggcgccgccgtgcccggcgttacctccgtgaccgaacagcacggcgcctcgtccgccgttgccgccggcgccggcggtgccgccggtgccgccggtgccgccgtctccaccgaa

SEQ ID NO: 1929 - DNA, 409 bp, Mycobacterium tuberculosis H37Rv
ccgccggcgcctccagtgccgttgattccgggcatcaggccggtgccgcctttgccaccgttgccgccgttaccgccgttaccgatcaactgggcgtcgccgcccttgccgccgtcgccaccgttgccgccgttgcctttggcgccgctgccggcgcccagaccgccgttgccgccgtcgccgccggtgccgccgctgcctccgctgccgagcaggccggcggtgccgccgctaccgccggcaccgcccgcgtggccgttgccaccgttgccgccggtgccgccgccgaagccgccgccaccgccggtgccgccggtgctgcccatcccaccggcgccgccggcgccgccgtcgccgaacagcttggcggccgatccgccgtggccgccgttgccggcgttgccggtgt

SEQ ID NO: 1930 - DNA, 400 bp, Mycobacterium tuberculosis H37Rv
tggcggccgatccgccgtggccgccgttgccggcgttgccggtgtctgcgccctggccgccgttaccgggatcaataccgctgttgccgttgccgccttggccgccggcgccggcggtgccgccgcctccgccggtgccgccgttgcccgacagccagccggctgacccgccgttgccgccgttgccggcgttgccgccgccgccgccggtgccggcgtcgccgccgttgccggacagccagccggccgacccgccgtcgccaccgcggccgccggcgccgcccgctccgccggcaccgccggcaccgccgttgccgaacaatccggccgttcccccggccccgccggcaccacccgcgacgcccggcgcgccgatggctccggcggggccggcgccgcc

SEQ ID NO: 1931 - DNA, 400 bp, Mycobacterium tuberculosis H37Rv
ccttggccgccggcgccggcggtgccgccgcctccgccggtgccgccgttgcccgacagccagccggctgacccgccgttgccgccgttgccggcgttgccgccgccgccgccggtgccggcgtcgccgccgttgccggacagccagccggccgacccgccgtcgccaccgcggccgccggcgccgcccgctccgccggcaccgccggcaccgccgttgccgaacaatccggccgttcccccggccccgccggcaccacccgcgacgcccggcgcgccgatggctccggcggggccggcgccgccggcgccgccattgccgccgctgccgtagagccagccgccgttgccgcccgcgccgccgttggcgccggctccgccggcccctccgttgccgccgt

SEQ ID NO: 1932 - DNA, 418 bp, Mycobacterium tuberculosis H37Rv
gtgctggcgggcgtgccggcttgttcggcgtcgggggcctcggcggcgcgggtggcgacgccggtgactccggcgaaggcggcttcggcgggccggggctcgccggcgggctgttcggcaaccccggcaacggcggcgtcggcgggatcggcggcgacgccgcagccggcggcgccggtggggccggaggcaacggtggggccggaggcaacggtgggtggttgttcggcaatggtggtgccggcggctccggtggcgacggcggcgccgccggccgtggcggtgccggcaacttgggctcggccgggggtatcaacgcccccgccggtaaccccggcagcggctcggtcggcatcggcggtgccggtggtgccggcggcaccgccgggctgttcggcgacggtggggctggtggggc

SEQ ID NO: 1933 - DNA, 409 bp, Mycobacterium tuberculosis H37Rv
gggtggttgttcggcaatggtggtgccggcggctccggtggcgacggcggcgccgccggccgtggcggtgccggcaacttgggctcggccgggggtatcaacgcccccgccggtaaccccggcagcggctcggtcggcatcggcggtgccggtggtgccggcggcaccgccgggctgttcggcgacggtggggctggtggggccggtggtgccggcgccgccggcggcttcggcggcatcagcgccgccaccccctcggcgggcagtgagggcgccatgggtggggccggtggtgttggcggcaacgccaggctgttgggcactggtggcgccggtggagtcggcggcggcggcggggccggcggcgacggaggccgcggcggagtcgcaacccccggcggtcagggcg

SEQ ID NO: 1934 - DNA, 400 bp, Mycobacterium tuberculosis H37Rv
gggcagtgagggcgccatgggtggggccggtggtgttggcggcaacgccaggctgttgggcactggtggcgccggtggagtcggcggcggcggcggggccggcggcgacggaggccgcggcggagtcgcaacccccggcggtcagggcggtgacgctggggacggtggcgccggcggggccggcggcaatggcggcggcgccagcggcgccggcgggtggctgttggggaccggtggtgccggtggtgccggtggtaacggcggcaatggcggaaaagccggttttagccctgggccgaccaacttcggtctcaacggcgccggtggtggtggtggtgtcggcggcaacggcgccaccggaccctggctgttcggcgacggcggccccaccccaggcagc

SEQ ID NO: 1935 - DNA, 400 bp, Mycobacterium tuberculosis H37Rv
gcaatggcggcggcgccagcggcgccggcgggtggctgttggggaccggtggtgccggtggtgccggtggtaacggcggcaatggcggaaaagccggttttagccctgggccgaccaacttcggtctcaacggcgccggtggtggtggtggtgtcggcggcaacggcgccaccggaccctggctgttcggcgacggcggccccaccccaggcagcaccggtgccggtgcggccggtggtcacggcggcgacgcccagctgatcggcaacggcggccacggcggggccggcggcaccggggtgccgaacgggtcaggtggtgccggcggcctcagcgggctgctgttcggcgagccgggggcgaacgggtaggttcggcgccgctgccgtgatcgcggcga

SEQ ID NO: 1936 - DNA, 409 bp, Mycobacterium tuberculosis H37Rv
cgccggcggcgccggcggccaagccggcggtggcggcgggaacggcggcaatggcggcaacggcggcaatggcggcaatggcggcaacggcgccaccggggggtggctgtacggcaacggcggggccggcggccagggcgccaccgccggagccggcggagccggcgctaacggcgtcagcagcaccaatggcggcggcaccggcggcaacggggggatcggcgggaccggtgggtccggcggggccggtggcaacgccgggctgttgggcgtgggcggcgccggcgggcacggcgcctccggcggcgccggcgataggggcggcgctggcggtaccgggttcataagcagtgacggcggtgctggcggtgatggcggtgatggcggcaacggcggggccggcggcacc

SEQ ID NO: 1937 - DNA, 401 bp, Mycobacterium tuberculosis H37Rv
ttgtcgccgagggtgctcagatcggtcgtccgcacccagtcggcgacggagtcgaccatgcgagcgatctgcacgatcgccagccccaccaaggctcccaccggcacgacgacggcggccagcgccgacaacaacgtgcaggcggccgacaggccggtattgaagcgcttggtgaaccacttgaaaagtggcgtgaacaaataggcgccgacggctgccaccacgatcagaacgaaatagttacgcaggaagtacgcaccgaacagcaaagcgatcaacgtgaggatcgccagggcgcgcttctgagtgagcgtgaattcggtgttcaaagcgggtccgcccttcgcttcttggtgctgactctgcgtccagcaggcgggttactcgcactattgcgtggt

SEQ ID NO: 1938 - DNA, 400 bp, Mycobacterium tuberculosis H37Rv
ccgtactggccgttgtgggatcgatggccgtattgcgactcgttacgtttgccaccgaggtgtcgaccttcgcgctcaacctgagtacagcgttgggcctcgcgttggctatcgactacacgctgctcatcgtcagtcgctatcgcgacgagctcgccgagggcagtgatcgagacgaagcactgatccggaccatggcgcttcggggcgcacggtgttgttttcggcggtcaccgtggcgctgtcgatgtcggcgactgcgctgttcccgatgtactttctgaagtcgttcgcctacgccggcgtggctaccgtggcattcgtcgcgaccgcgtcgatcgtgatcaccccggccgcgattgtgttgctaggtcctcggctagatgcgttggacgtgcgc

SEQ ID NO: 1939 - DNA, 400 bp, Mycobacterium tuberculosis H37Rv
aaggccaacacgtattccacgggtatcgacgagattcgcgcggctgtgagcgggtaggtgcccttcgtcaacagcgtccacagcttcgaaggcagattcttggtcgccggcgcggcgaatgaccccaccgtctcggacaccgaaccgatcagttcataaagtctggccagcgcgcccgggttggcgatcggcgccgggggcgagaacggtgtcagccgtgcggcggccgccgccattgtggcgtagaggttcatcgcctcgccatcttgggaccagtactgggcatacagtgcatcgagggcaaagatcgcgggggtgtgaatcccgaaaatgttggtcgtggcgagagcgaggcgcgtcagtcggttggtctcgatcaccggcagcggcacgtgtgctg

SEQ ID NO: 1940 - DNA, 514 bp, Mycobacterium tuberculosis H37Rv
gaaggtggcgccaacgacctgggcggcacgctgatggaggagaccatctcgcggatggccggttccgaacacggatcggccaagaccgtcgctgagctggtcgcgatcgccgaaggcatcggccgcccggcgcgccagcgcactaccacatacgccctgcttgcggcctagccccggcgacgatgccgggtcgcgggatgcggcccgttgaggagcggggcaatctggcctagccccggcgacgatgccgggtcgcgggatgcggcccgttgaggagcggggcaatctggcctagccccggcgacgatgccgggtcgcgggatggggcccgcatgggcttaatagttgttgcaggagccggcaaccgactcgacaaggccgatgtactgtgccgcccccggcacagcttgcaattgcgcggccatggcagcgcgctgaggtggcggtgcggcgaggaaattgcgcaaataggactgcgccaccggtgaggcgttgaactgtgcggcagcccccg

SEQ ID NO: 1941 - DNA, 400 bp, Mycobacterium tuberculosis H37Rv
tccaggccgatcatcgtcttgcccgcacccggcggcagcaccagataggcacggttgtcgccggcagcgacgtcggcgtcgaacgcgtccaacgcttgctgttggtatacccgccagttgccggcaaaggcccgcgattccaggtcgcggtgaggatccacaaggattcaccctagccaagcacccacgttgggcgcgaaagacgcaaaaggccccgaatccaacggatttcggggccttttgcgtctgctcgcgcccgtgcggctcgtgcggatcacacgcgcggtgcatgctgctgtggctgtcgagcagtgttgctaccttaactttcccaggcctacgacgtctggtagcggcatggcaacggcctgtgagttggctggataatgtgttcttcgtc

SEQ ID NO: 1942 - DNA, 413 bp, Mycobacterium tuberculosis H37Rv
tgcaacagctggcccagcccacgcagggcaccacgccttcttccaagctgggtggcctgtggaagacggtctcgccgcatcggtcgccgatcagcaacatggtgtcgatggccaacaaccacatgtcgatgaccaactcgggtgtgtcgatgaccaacaccttgagctcgatgttgaagggctttgctccggcggcggccgcccaggccgtgcaaaccgcggcgcaaaacggggtccgggcgatgagctcgctgggcagctcgctgggttcttcgggtctgggcggtggggtggccgccaacttgggtcgggcggcctcggtcggttcgttgtcggtgccgcaggcctgggccgcggccaaccaggcagtcaccccggcggcgcgggcgctgccgctgaccagcctgaccagc

SEQ ID NO: 1943 - DNA, 405 bp, Mycobacterium tuberculosis H37Rv
gcgccacctcccacgccgccgttgccgatcaaccccccgggcccgccgtcttggcccggtccgccattggcgccgtcaccgatcgaacagtgcctgggtgggagcgttgatcacattcagcacgtcttgctgcacgctctgcgccacagcagcgttgacggcttcggcagccgcataggccccgccagcgccggtcagggcttgtacgaactgctgatgaaacgccgtcgcctgcaagctaagcgcctgataggcctgagcgtgtctggcgaacagtgacgccacgaccgccgatacttcatcggcacaggcggccagcatcgcggtggttggggctgccgcggcggcattggccgcgctcaatgccgagccgatgcccgccaaatccgttgccgccgatgccag

SEQ ID NO: 1944 - DNA, 400 bp, Mycobacterium tuberculosis H37Rv
tcggattactgtccgagatcccgcgttgtccacctgaaggtccatctaaaggttcgtctggaggttcatcccagggcccgcccgacggggctgcggcaggcttcggcgaccgcttcgctgacggcgatggcgggaatcggggccggcaatcgcgggtgcgtcgctagccggtgagccacttgtcgcagcgcatggcggggttgctgcgagttcatggcgagtggtcgcgatccgtggatactagggtggacacggacaacgcgatgcctgcacgttttagcgcccagattcagaatgaggatgaggtgacctccgaccaaggcaacaacggcggcccgaacggcggaggccgcctggcgccgcgcccggtttttcggccaccggtcgacccggcgtcgcg

SEQ ID NO: 1945 - DNA, 3397 bp, Mycobacterium tuberculosis H37Rv
gacgctggtgctgacgatcccattggcgtggttgttgcaccgtttcactcgggtccagggtgaccggccttcctagcggcggcagaagcaggtgtcacgatcgggacgacgaactccgcgatcatcgctcgttcgtcggcttcgtcacggccggggaacatcagcagcgatgtgagcatccggaccacccagcgggcgcggcgttcgacggtggtcggatcgtcgggacctagtgagttgaggaatgccgcggccagggccgcgatcacctcggaccgtccggccatctcgccgccgatcggtgggcgggtggtggtaaaccacgcggccaacgcggggttgtcgcggaccatccgcaacgtcgtggtgatgctcaccagcagccgttcggcaggttcgacgacatcggcgatcttcaccatgatctcgcggccgagccggcgggtctcgcggtgcacgtacgcggttcgcagcgcctcgcggctgtcgaagtaccgatacagtgttgcgcgcgaacagcctgcggccttggcgatctcgttcatgccgatcgacgccgggtcacgctgcgtaaagagtcgctcggcggcgtcgagtatccgatctgcggctaactcggtccgacgcgcggacagccagtcggtacccgccatcaggatgtcactcggaacggcaccgacagcggacgccggacataactgccgccggaccacacgatgcgtgactcggccacctcgaagtccgggcaccgggccagcagttcggtcagcgccacccggcattgcatccgggccgcggccgcacccaggcagtggtgggcgccgtggctgaaggtcaagatgttgcgcgggcaccgagtgacatcgagttcggctgcgtccgggccgtattggcgttcgtcacggttggccgagccgtacagcagcagcacccggcgaccggccgggatggtggtgtcaccgatcgtgacgtcgcgcgtggttgtgcgcgccagcccctgcaccggcgaggtgagccgcagcagctcctcgaccgcgtcggggatgccctctgggtcatccagcagcagccggcgctggtcgggccgccggtgcagcaacggcatcgaaccgcctagcatgccggtgacggtgtcgttgccgccggtgaccatggtgaacgtgaacgccagtatggacagtgtgccggcggtgtcgccgtcggcgccgaccccggcggctaccaggtgggagatggcgtcgtcggcgggctcggtgcggcgtcgctcgatcagcccggtgaagtaggccatcatcgagccgaccgcgtccagtgcgccggtggtggcgccgtcaaccgcgttcgccgccacgatggcctgggtccacccgtcgaattgcgtccaatcctcttcgggaacaccgagatagtgcgccaccaccatcgacgggagcggtttgaatagttcggtgacaatgtcgccgccaccgttggcgcgcagcttttcgagccgctcaacgacgaacttgcgcaccgtgggctcgacggtttcgacctgtcgtggcgtgaagccgcgcgacaccagcttgcgaaactcggtgtggaccggcggatcctgcatcaccatgggcggggtgtcgtgcagtccaatcatttccagctcgccgtagttaacggtcaagccttgcgccgacgagaacgtctgatggtcccgcgctgccgaccagacgtcggcgtgccgggacagcacgtagtagtcgtactcgggacgctgcggcgggacgacgtggtgcaccgggtcgtggtcgcgcaacgcgcggtacatcggccacggattcggccaggtttcggcggtggcgagctggaattcgtgagacattactgatgtcatgtcttatgtctaagacattccatcggtaatatcaatcggcgattgtgaatctggtgacgcgacacgccgaggacgcgtcgtgcggttcacactcggcgggacgtcgcgacggatcagatcgccgagccgggattgaggatgccctgggggtccagcgcttgcttgatgcgctggttgagggccaggacgtcgggcccgagatagccggccaaccacggccgtttcaaccggcccacgccgtgttcgccggtgatcgtgccgcccaggccgacggccaggtccatgatttcgccgtacgcgaggtgggcgcgctctagcatcgcggcatctgcggggtcgtacaccagcaacgggtgggtattgccgtccccggcgtgggcgatcaccgagatcatcagattccgctcctcggcgatgcgcgcaatcccggtgaccagttcgcccagtgcgggcagcggtaccccgacgtcctcgagcagcaacgcccccttgctctcgaccgccggaatggcgaaccgccgggccgcaatgaacgcctcgccctcatccgggtcgtcggtcgaaaacacgtctatcgcaccgttttcggcgaacacggcggccatcacggcggcgtcttcggtggccgcgcggccacgttcatcagaaccagccaccagcatggccgccgcatcgcggtccaggtccatccgcaaggtgtcctcgacggcgttgatcgccaccgaatccatgaactccagcatcgcggggcgaagtcggccggtaaccccgagcaccgcatcgaccgccgcctgcaccgagccgaagctggccaccacgatgctcgatgcattctgtgcgggcagcagtcgcaacgtcacctccgtgatgacgcccagcgtgccttcgctgccgacgaacagtttggtcagggaaagcccggcgacgtccttgagccgtgggccgcccagccggaccgcggtgccgttggccagcacaacctgcatgcccagtacgtagtcgcctgtgacgccgtacttcacgcagcacagcccgccggcgttggtggcgatgttgccgccgatgctgcagatctcgaacgacgacggatccgggggataccacaggccgtgttcggcggcggcctccttcacctcggcgttgtacaggccgggctggcacactgcggtgcgggtgaccgggtcgacggtgatgtcgcgcatcttttcggtggacagcacgatcccgccatccagggcggtcgccccgcccgaaaggccgctaccggctcctcgggtcaccacgggcacctggttcgcactggcccaacgcagcaccgtctgcacctcttcggtgcgccgtggccggatgattgccagcggtttgccggccgaagggtcaaaggcccggtcttgccggtagccgtcggtgacggcggggtcggtgaccaccatcccctcgggcagctcggccatcaggccagccagcacatcggtattcactgagccgatcctacgggccgatcgatgtccgcttggggcgccagat

SEQ ID NO: 1946 - DNA, 401 bp, Mycobacterium tuberculosis H37Rv
tactggcagacctggcattacggtgactccaccatggctggcgtttacagtgcgcgcaacaacaccgaagcccgcgctgcactagccttcatggacaccgaactgcggatcgactaccgcgacaccgaagctcagttcgccgaactgcaacgtcggatggccgaggacggctgggtgcgcgcgcaactgctgcactacatgcgcagcgcaccggatttctatttcgacgaaatgtcgcagatcctgatggatcgctggtcgcggggcagggtagcgctcgttggcgacgctggttattgctgctcgcccttgtcggggcaggggaccagcgtcgccctgctgggtgcctacatcctggccggcgaactcaaggcggccggtgacgactaccaactcggatt

SEQ ID NO: 1947 - DNA, 543 bp, Mycobacterium tuberculosis H37Rv
cgaatggtcagcacacatgcggttgtcgcgggggagacgctgtcggcgttggcgttgcgcttctatggcgacgcggaactgtatcggctgatcgccgccgccagcgggatcgccgatcccgacgtcgtcaatgtggggcagcggctgattatgcctgacttcacgcgatacaccgttgttgccggggacacgctgtcggcgttggcgttgcgcttctatggcgacgcggaattgaattggctgatcgccgccgccagcgggatcgccgatcccgacgtcgtcaatgtggggcagcggctgattatgcctgacttcacgcgatacaccgttgttgccggggacacgctgtcggcattggctgcgcgcttctatggcgacgcctccctatatccgcttatcgccgccgtcaatggcatcgccgatcctggcgtcatcgacgtcgggcaggtactggtcatattcatcgggcgtagcgacgggttcggcctaaggatcgtggaccgcaacgagaacgatccccgcctgtggtactaccggttccag

SEQ ID NO: 1948 - DNA, 400 bp, Mycobacterium tuberculosis H37Rv
agtgtttggtgggggtggcaagaccatttccgcgaaatcgtcaacgtcgaccgggcatcgctggtcgccctcgacttcggcgacctgtggaatggctggacgccagttgggtaatcctggtcgcttgtcgccccgccgggctgggttagattgcccggctcctcaacccgccgtttcggcgtgcatcgtcgccgggctagccgtctcggtcagcggaccggatcgtcgacgccgccgcctgcgcggcggctacctggccgaacgtggacggcggcggcgctagagtcccggggcgctcgacgacctcggtcgcccgcgccgcggcaccgagaaccatggcccggtcggattcgtccgcgaactcgcgctgtgctgcccgcacgaccagggcaatttgggt

SEQ ID NO: 1949 - DNA, 402 bp, Mycobacterium tuberculosis H37Rv
gctcagtagacggggtgtggagatcatttcccggcgcgcgccccgtggcgacgaattcgacatcatgaccgacgagattgtcgttgtggaactgtgcgacagcacccaggaccgaagggtaggttacgagatcgcgctcgacaggggcgcgttgaccgcatttctgtcgtggttggagtcccggccgtcgccgcgcgcgcgccgccgtagtatgtgacgcactggtcagcagacgcaaaagcccccatttcgggctctactgactgatctgtgggtggttgtgtcggcctggcagggtggggcggtggccggcgagggtgagcatggctagggcgatgagggcttgtggtgagcggaatccgaacgcgatccgggtcagtaggcggatcttggtgttggtgg

SEQ ID NO: 1950 - DNA, 401 bp, Mycobacterium tuberculosis H37Rv
actcgcaaccacatccgttcacggcgctagccgtgcgtccacaccccccaccagaacaaatttgcatagagttacggcggccacagcggcagggaaacgcccggtcccattccgaacccggaagctaagcctgccagcgccgatgatactgcccctccgggtggaaaagtaggacaccgccgaacatacaaaaacacccccggtaacggtggtgtttttgtatgtttatatcgactcagccgctcgcgagcgggcgaattatggcttcgattttcgcaatgacgataccctcgcgggcgggggcgctcagtcgaagagcgtcaagtctgcgggcgcccggcttttctccaactcgagcagagctcgtttccggttgattccaccgccgtacccggtgagct

SEQ ID NO: 1951 - DNA, 1748 bp, Mycobacterium tuberculosis H37Rv
atcacgctgtccaattggggtgcgccggtcaccatcccgaacccggcgggataacaggcgcgaaccggcccggtccagccccatcgctggtcgatggcctggccggtccggtactcgtccgcgggcggaggccgccttcgaagaaatcctttgagaattcgccaaggccgtcgacccagcatggggtcagctcgccagcctgaaccgccccggtgagtccggagactctctgatctgagacctcagccggcggctggtctctggcgttgagcgtagtaggcagcctcgagttcgaccggcgggacgtcgccgcagtactggtagaggcggcgatggttgaaccagtcgacccagcgcgcggtggccaactcgacatcctcgatggaccgccagggcttgccgggtttgatcagctcggtcttgtataggccgttgatcgtctcggctagtgcattgtcataggagcttccgaccgctccgaccgacggttggatgcctgcctcggcgagccgctcgctgaaccggatcgatgtgtactgagatcccctatccgtatggtggataacgtctttcaggtcgagtacgccttcttgttggcgggtccagatggcttgctcgatcgcgtcgaggaccatggaggtggccatcgtggaagcgacccgccagcccaggatcctgcgagcgtaggcgtcggtgacaaaggccacgtaggcgaaccctgcccaggtcgacacataggtgaggtctgctacccacagccggttaggtgctggtggtccgaagcggcgctggacgagatcggcgggacgggctgtggccggatcagcgatcgtggtcctgcgggctttgccgcgggtggtcccggacaggccgagtttggtcatcagccgttcgacggtgcatctggccacctcgatgccctcacggttcagggttagccacactttgcgggcaccgtaaacaccgtagttggcggcgtggacgcggctgatgtgctccttgagttcgccatcgcgcagctcgcggcggctgggctcccggttgatgtggtcgtagtaggtcgatggggcgatcggcacacccagctcggtcagctgtgtgcagatcgactcgacaccccaccgcaaaccatcggggccctcgcggtggccctgatgatcggcgatgaaccgggtaattagcgtgctggccggtcgagctcggccgcgaagaaagccgacgcggtctttaaaatcgcgttcgcccttcgcaattcggcgttgtcccgccgcaagcgcttcagctcagcggattcttcggtcgtggtcccgggccgtgcgccggcatcgacctgcgcctggcgcacccacttacgcaccgtctccgcgcagccaacaccaagtagacgggcgacctcactgatcgctgcccactccgaatcgtgctgaccgcggatctctgcgaccatccgcaccgcccgctcacgcagctccggcgggtacctcctcgatgaaccacctgacatgaccccatcctttccaagaactggagtctccggacatgccggggcggttcagccgcgccggctggcaaccgttcccgctcgagaaagacctggaggaataccagtgacaaacgacctcccagacgtccgagagcgtgacggcggtccacgtcccgctcctcctgctggcgggccacgcttgtcagacgtgtgggtttacaacgggcgggcgtacgacctgagtgagtggatttccaagcatccc

SEQ ID NO: 1952 - DNA, 400 bp, Mycobacterium tuberculosis H37Rv
cgcgttgggccgcgacgcaacccctagggacatccaccccaagcacaatgcaccggcatttctgttcaaagacgacttcaacagctggcgggacaccccgaagtatcgattcgacgaccccaacgatctgctgcaccgggtcaaagcgcggctagccgagccagcgctggccgcccggatcaagcgcatggacacactcttcaacgccatcgttgcagtactggccgtgggttatttcgcggttcagggtgtgcggttggtggaaccgagctggatgccgctgtgggccttcgtgattgcgatggttctgctgcgcagttcgttggccgggttcggtcattacgcactgcaccgcgcgcaacgaggcctcaaccgggttttcaacaatgccttcgatctc

SEQ ID NO: 1953 - DNA, 400 bp, Mycobacterium tuberculosis H37Rv
cagcagcaccgccggttcatcaagacccacacgccgttggacggcctggtgctcgacgaccgcgtcagctacatctgcgtaggacgcgacccgcgcgatgccgcggtgtcaatgctgtaccaatcggccaacatgaacgaagaccggatgcggattctgcacgaggccgtagtgccgtttcacgagcgaatcgcccccccgtttgcggaactcggtcatgcgcgcagcccgaccgaggagttccgggattggatggaggggccgaatcagcctccccctggcataggtttcacacatctgaaggggatcggcactctggccaacatcctgcaccagctaggcacggtatgggtccgccgtcacctacccaacgtggccttgtttcattacgccgattacc

SEQ ID NO: 1954 - DNA, 762 bp, Mycobacterium tuberculosis H37Rv
gacggcggccccaccgtttccgccggtcccgccgttgccgccggtaccgtcctcgccggcggtgccgccctttccgccggtcccgccggtcccggcgtcgccgatcaggccggcggcaccgcctcgcccgccggtcccgccggcgccgcccttgccgaacacgccgaagccgtcgccgcccttgccgccggtgccgccggtgccgccggtgccgtagagttgtccgccgttgccaccggccccgccggcaccaccaattccgccattgccgtcgggcccctgggcgctgtgcccgccggccccgccggtgccgccgtggccaatcagaccggcggacccgccggctccgccagcaccgccaagaccgttcggactggtgacggtcccgcctgcccccccggtgccgccgttgccaatgagttgcccaccagcgccgccggctccaccggcgccgccgccctggccacggatatcaccgccgttgccgccggcaccgccgtcgccgatcagccaggcattgccaccggccccgccggcgccgctaattgcgccttgcccgccgttgccgccggcaccgccgttgccgatgagcccgccggtaccgccggcaccgcccgcgcccccgaagttattctccccgactttgcctccaaccccagtttgcccgccgcgcccgccggccccgccgctgcccgacaggccgcggccgtcgccgccggtgccgccggccccgccgttgcctcctgagctgacgccggttcc

SEQ ID NO: 1955 - DNA, 400 bp, Mycobacterium tuberculosis H37Rv
gacatgccaatgatgggagcactgaccacaccatccccgggagcaccagccaggaccggcccaagcgcaatcagcggagttccgaccggtatcaccggagccggaacggcgggtaccggtaccggtgcgcccggtatcggtaccggtccgccggggattggtaccggtgcgcccggtatcggtaccggtgcgccagggattggtaccggtgcgccgatgggcaccggtgcagctgccggcactggcccaggcgcgacgaacggaacaccagccatgtcagtaagtgcggcactgcacgctcccgcggctgccggtccaccggcagccaccgggtcgccggcggctaccggcgcgtcgcccgccatgccctggatgcacgcgtagccacccgtcatcagcg

SEQ ID NO: 1956 - DNA, 427 bp, Mycobacterium tuberculosis H37Rv
cgtggccaccggtcccaccggtgcctgttccaaagggccccgcgtcgccggtgccgccggtgcccccggagccacccatcccgccccggccaccgacgccggcaaaaccattgccgccaaagccgcccgcacctccgttgccacccatcccaggctgagagccgttgtggccggtgccgccggtgccgccagcgccgccggtgccgccggtgttaccgttgccgccgttgccgccagtgccgcctctgccgccggtgaggccgccgttggcaccctggccgccggtgccgccggtgccgccggtgccgccggtgccccagtcgccgggggtgccacctgggccgctggaaccgccaagtcctgcatcgcctccgcgtcctgcatcgcctccgcggcccccgccgccgccgtcaccaggtgaggtgac

SEQ ID NO: 1957 - DNA, 400 bp, Mycobacterium tuberculosis H37Rv
cgccggccccccctttgccgccggacccgccgacaccctggattccgttctggccaaagaggttccccgccaaaccgccgggcccgccttggccgccgttaccgccttgcgcgccgggcccgccgtggccgccgtcgccgcccttggcgcccggcgtggtggcgttggcgccgttggcgccgttgccgccggccccaccggtcccgccgtcgcccccgaagtctccgccccggccgccggccccgcccgccccgccagccccgccgttctggccgctcgtgccggattcgcccgcggtggtgggcgaggaaccggcgacaccggccatgccgtccccgcctttgccgccggccccgccattaccaacaagcccgccgttgccgcccttgccgccggcccc

SEQ ID NO: 1958 - DNA, 400 bp, Mycobacterium tuberculosis H37Rv
ccgctgcggtgccggccctgctcggccaacgtagtcagatggttggatcgccaccggcgccaccggcgccgcccgcgccaccagcaccgccgctgccatctgggtccgtcgagtcgccgaggacgccggcgccgccattgtcgccaaataccgtgagacctagcagggtgccggcgccgcccttgccgccggccccgccgtttccgccgccgccatcgccgatgatgttttccccgcccttgccgccagccccagcgttcccgccggctccgccactggcgccggtgccgccgggtgcaacggcgttggcgccgttaccgccgttgccgcctttgcccccggtgtctgcaaagtcgggggtcgcaccctgcgcggcgcgggtcacgccgtcaccgctgag

SEQ ID NO: 1959 - DNA, 400 bp, Mycobacterium tuberculosis H37Rv
gccctgctcggccaacgtagtcagatggttggatcgccaccggcgccaccggcgccgcccgcgccaccagcaccgccgctgccatctgggtccgtcgagtcgccgaggacgccggcgccgccattgtcgccaaataccgtgagacctagcagggtgccggcgccgcccttgccgccggccccgccgtttccgccgccgccatcgccgatgatgttttccccgcccttgccgccagccccagcgttcccgccggctccgccactggcgccggtgccgccgggtgcaacggcgttggcgccgttaccgccgttgccgcctttgcccccggtgtctgcaaagtcgggggtcgcaccctgcgcggcgcgggtcacgccgtcaccgctgagccccccgagcccgc

SEQ ID NO: 1960 - DNA, 400 bp, Mycobacterium tuberculosis H37Rv
ccctcggcaccactaccaccgagcccgccgtctgcgccgcggccgccagtcccaccggccccgccattgccggcgagagttccgccgtcgccgccggcgccgccctggccgccgttgccgccgctattgcctttgccaccgactgcgcccgaatcgctcgcgttcgtccctgcggcgccgttggcgccgttgccgccggcgccgccgttgccgaccagcccgccatggccgccgggtccgccgttggcgccgttggtgcccgcggtggtggcgttggcgccgttgccgccggccccgccgttgccgccgctggtgggggtggcgccgatggcgccctgagcgccggtgatggagccggctccgccggtgcctccggccccgccggcgccggggtcaccgc

SEQ ID NO: 1961 - DNA, 401 bp, Mycobacterium tuberculosis H37Rv
ttcagcggccgcgatggtcagaatcgttccagtatcggtagcgtgatcgtcgatctcgccgtgggcggcaagattctggacattccggcggagccgattttgcgccccggcgctcgaggaatgtttgacgactgtggggtgtcaatcggatcgattgtgcgtgccggcgatacgcgacttttgtactacacgggctggaatctcgctgtcaccgtgccctggaaaaacaccataggcgtggcgattagcgaagcaggtgcaccattcgagcgatggtctacttttcccgtcgttgcgctggacgagcgtgatccattctcgctttcttatccctgggtcatccaagatggagggacataccgtatgtggtatggctcaaatctaggctggggagagggcac

SEQ ID NO: 1962 - DNA, 400 bp, Mycobacterium tuberculosis H37Rv
aaaaattcatcacaaccatcccgtcagccggccacacccaccgggcttcacggcgctgtctggccccaaccgcagcgaagcctacgaaaaagccgggcgcttcggacgggcgcaggttaaatccaggtaacgcgtgacgaatctcgcgaggagcctccttgcggccatgggccgccacgggtctcggtggtcgcggccccgtgcttccgcgtccttcgattgtggacgtacgctcaccgatgtgacctgggccatactgatccgctgtcaaggagaacggaaatgaccacaacagagcgcccgacaaccatgtgcgaggcgttccagcgcaccgccgtcatggacccggacgccgttgcgctacggacccccggcggtaaccagacaatgacatggcgag

SEQ ID NO: 1963 - DNA, 400 bp, Mycobacterium tuberculosis H37Rv
ttctacccgctcgacgtcggtgctcagcacgtcggcgccacctcgttttcggtgtacaacaccctgcccgccgagcagctgacctacgtgttcgacaacgcggggaccaaggtggtcatctgcgagcaacagtacgtcgatcgcgttcgcgccagcggtgtgcccatcgaacacatcgtctgcgtcgatggcgcgcccccggcacgctctcgctgacggatttgtacgcggccgcctccggcgacttcttcgacttcgagtcgacgtggcgtgccgtacaacccgaggacattgtcaccctcatctacacgtccggcacaacgggaaaccccaagggtgtggagatgacccacgccaacctgctgttcgaggggtatgccatcgacgaggtgctcggaat

SEQ ID NO: 1964 - DNA, 400 bp, Mycobacterium tuberculosis H37Rv
tacaacctggactcgcgcgaccaaggtgcggcggatcgcagggatgtcctggccgcggccgacggcgcttgggcgtgcaccctggtgggcgaatgttcgacggcttgtccgaaaggcgtcgatcctgccggcgcgatccagcgctacaagctgaccgcggccacgcacgcgctgaagaagttgctgttcccttgggggggcggatgagcgcctatcgccagccggtcgaaagatactggtgggcgaggcggcgttcttacctgcgattcatgcttcgcgaaatcagttgcatcttcgtggcctggtttgttctctatctgatgctggtattgcgcgccgttggcgcgggcgggaattcctaccagcggtttttggacttcagcgccaatccggttgtcgt

SEQ ID NO: 1965 - DNA, 400 bp, Mycobacterium tuberculosis H37Rv
gatccaccggttgagtcagcggtgcgaatggctgggcaccgttgtggtgtccggtcccgtaccgtactgttgaatccgcggatccccgcctgaggtacggggcgtggtcgcgccccgggcaatagcgtcgccggttatcgaaaggctaacgggtgcaggggatttcagtgactggcctggtcaaacgcggctggatggtgagatccgtctttgacacgatcgacggtatcgaccaactcggcgagcagctggccagcgtgaccgtaaccttggacaagttggctgcgatccagcctcaattggtggcgctgctaccagacgagatcgccagccagcagatcaatcgggaactggcgctggctaactacgccaccatgtccgggatctatgcccagacggc

SEQ ID NO: 1966 - DNA, 1196 bp, Mycobacterium tuberculosis H37Rv
tcaggggcgggcgcaatggcttgggcgtggccgatgaacttggcccacagccacggcacttgggacagcacgccgatgcgggcacgcacgtcctcgccgcgtttggtgtcgtgggtggacagtgtcgtcatggaccgtggccacaaccgagcacgggtggcggcccggtgatgaaactccgcggcgcccacaccaaaccggcgcggttctccgcccacttcattgagtgacaccagccgggcatcacggtagaacatacagtcttcgacggccttggcgctcaccgcgccgcacagttgttgcaggcgtacggctggttcgccaccgcgggccacagctgcggcaatcagctgcagtccaggtgccaattgtggtgttgtcgaatgggtttcagccaacgcgcagggtaggacggcggcttggccggggtaatcacagcgatagcgtccgatgtggcgcagcagtgcagccaccgccgcgggcaacagcggatgatcggcgccggccgccgccgcgatgcatcgccgcaatcggcgaagctcactggccaacgtatggacggccgcgtgcaccttgaggtcggccaacatcgccggcatctcctgatagtccacaccggccgattcgaccagcgctgtcagtggtgactctccttgggggtcaacgaggacgccacctatttcgcgcagcacgtcatagccggtggagccgtccactggcagcgtgggctctaacgcctcgtcgaccgccaggattttttcgaccacgatccaggcgttcgggccgagcagttcgcgcagctgggccaagtatccgctgggatcggatagtccgtcgaggtggtcgacgcgcacgccgtcgacgagtccttcggtgaaccagcgagcgacctctgcgtggctggcgtcgaacacagcgcggtcttcctggcgcaggccggccaacgaggtgatcgagaagaaacggcggtagccgcacagcccgtgccgccatccgaccagccgatagtgctggcggtcgtgcacagcggggccggtgccgtccccgctgccgggggcgacgggcagcgccaggtcgcccagccgcagcaggtcgccgtcgactctgaggttggcaacgtcgctgtcggagcccaatagcggcaggatgatccggccatcacctagctcccagtcgatgtcgaagaactcggcata

SEQ ID NO: 1967 - DNA, 401 bp, Mycobacterium tuberculosis H37Rv
cggcacctacaagcggctcaaacgaatcgacaacgcaacccgcagcgacgacaaagaaatccgcctgttcgcggagaaacaaatggcgccgctggccgccggatcgccgagctggaacggccgaaagccaagcagcggcaacaggaaggcggcgaccatggccgccaggctcgatattctggcttggggcccatgggccccaagccagaatcggagcgtcgttcgacgaaaacagacactgctatcggcgcagccctcggcatctccgccggcacctaccggcggctcaaacgaatcgacaacgcaacccgcagcgagttggcgcgtgggcggcccggcacccctaagcagaggccgcccacgcctggccctatcctacctacgcggtagtctccaccttc

SEQ ID NO: 1968 - DNA, 400 bp, Mycobacterium tuberculosis H37Rv
aagccaagcagcggcaacaggaaggcggcgaccatggccgccaggctcgatattctggcttggggcccatgggccccaagccagaatcggagcgtcgttcgacgaaaacagacactgctatcggcgcagccctcggcatctccgccggcacctaccggcggctcaaacgaatcgacaacgcaacccgcagcgagttggcgcgtgggcggcccggcacccctaagcagaggccgcccacgcctggccctatcctacctacgcggtagtctccaccttcagaactcgaaacgcgttgcgcaccagcacatctgatccgaccctgaaccaggcgaagaatccgcgctgcccggtcggccggcgattcggcccgaacaggtgaggcaccaactccaccatggac

SEQ ID NO: 1969 - DNA, 401 bp, Mycobacterium tuberculosis H37Rv
tggacgccgcgaccatcccggcgaaggccagggacagttaagtggagtcccactcccaccgctagccacgagatcgtttcacaccttctcaaggttcagcggtccggtcacaggcatctcggatgcctgttctgcgtgcagcgtgggcggctttggccgcgatcggtcggcattgggccctgcttgtgcagggctttttttgctgatggtttgggtgtgttccccacctgattccggccgggtccaacaagctggtcgcgcctggaacagcagccaacgagggaggccccatcagcactgaaacccgcgtcaacgagcgcatccgcgtacctgaagtccgattgatcggcccagggggggagcaggtaggcattgtgcgtatcgaagacgcacttcgcgtc

SEQ ID NO: 1970 - DNA, 400 bp, Mycobacterium tuberculosis H37Rv
gaacagcagggcgttgccgccggccccaccggccgcagcggcactgcccccgttgccgccggcaccgccgttgccatacaacagtccgccggtgccgccggccccgccagcgccgcctgcacctccagcaccgccggcgccgccggcgccgccgttgccgatcaatccggcggccccgccgttaccgccggccccgccgttgccgccgttgccgtacaaaattccaccgggcccgccgttgccgccggcatttgacccggtccccgccactccatcggcgccgttgccgatcagtgggcgccccagcagcgtctgcgtgggcgcattcaccgcgtcgagcagggcctgcatcgacgacacgctggcggcctcggcgccggtataggccgccgcgccgccg

SEQ ID NO: 1971 - DNA, 400 bp, Mycobacterium tuberculosis H37Rv
ctgaccaccggagaggtcgtcgactcgcgcggacagctggtcccggcggaacccgagacgctctagcagctgggtcggggtaacctcgcggccttcgacctgatagccgccacgcagcctgcctagcacatcggcgatccggtcgtcggcaaacggtgccagatcgtccccgtgctgatcgagcactgccagccggacggcttgacacgtccgacaccgggctggacggtgccggcgatcaagcccagcagggtcgacttgccggcgccgttagccccgacgatgccgatacgttcacccgggccgatccgccattcgatatcgcgcaacaccgggcggcccccagaaggctggtacgagaccgacacgccgagcaggtcgacgacgtcctttccgagcc

SEQ ID NO: 1972 - DNA, 440 bp, Mycobacterium tuberculosis H37Rv
gcgatcgcgtgcctgagcgcgactcatctgtgacagttccgtcacggctgggtcaggtgccggtgtcctggcgacgccgactgcgcacagaccgaaacagcacggtgtggatgtgccatgatgtgcacgctgtcaaggccagtcgggtgacgatgcgggccggtgtggtccgaggaggagcccgacaatttaagctagtcgggtgacgatgcgggccggtgtggtccgaggaggagcccgacaatttaagctagtcagggagccctcaggagcggtggtggatctcaatttttcgatggtcacgcgaccaatcgagcgcctggtggccacggcgcagaacggtctggaagtcctgcgactcgggggcctggaaaccggcagtgttccgtcgccgtcccaaatcgttgagagcgtaccgatgtacaagctgcggcggtatt

SEQ ID NO: 1973 - DNA, 400 bp, Mycobacterium tuberculosis H37Rv
tccaccaatcgggggacgatcggcccgcggtgcccccctacccggttaacgcgcacacattccacacgaaacgcgttagtgtgcaaacctttatcccactgtgctgtgaacgtgactcttgttggccactgttgtcgaggtgccttaaatgacgcaagtgcgacaacaacgagaagcgggagatgacggcacacacacacgacgggacacggacctggcgaacgggccggcaggcgacgacgttgctcgcgttgctggccggggtgtttggtggtgccgcgagctgcgcggcgccgatccaggccgacatgatgggtaacgcattcctgacagcgttgaccaacgccggcattgcctatgaccaaccggcgaccacggtggcgctaggcagatcggtttg

SEQ ID NO: 1974 - DNA, 401 bp, Mycobacterium tuberculosis H37Rv
cgaggttgtcgaacgcggcgacggcctcctcccggctactcgaatacatgttcgaatactatcacggttagccggccgatgccatgctgattgtgggttaatccaatgtggtgcagttgaattcaggagcatcgccagccgcgaggccacgcctattcggcgagcataatggtcggctcggagacatccagcaacatgaggcgatgaagacatcacgtgcgatgggtggtcacggtgggcagctctgacgcgctgtttcgcgtagtcgacggcgtgcaggtagccccggccttgacacgttccggcccgctcaagcgagtagtccgcggatgtcgtcgacggtgggtacggagccgaaggcgttgccgtcgtcgacgacgctggcgaataggtttgaggtc

SEQ ID NO: 1975 - DNA, 401 bp, Mycobacterium tuberculosis H37Rv
cggttggcggcacgcatgcgggaactggacatcaaaccggaactggaaatctatgacaccgggcatttggaggcgtgcctgcgactgtgggcggaagacctgctggccgaacccttgcagttcagcatcgtgctcggggttcggggcggaatggccgccaccgccgataatctgctcacgatggtgcgccggctgccccccggggcgatctggcaagtcatcgcgatcggtaaggccaacatggaactgaccgccatgggcctggcgctgggcggcaacgcccgagtcggcttggaggacaccttgtacctgcgcaagggcgagctggcgccgagcaatctggcgctggtatcgcgcacgatacgtctcgccgaagccttggacctgccgatcgcctcggt

SEQ ID NO: 1976 - DNA, 400 bp, Mycobacterium tuberculosis H37Rv
gatccttggtggccagcgcacgcccgaccgcgacaatggtcgcggtgacgccgacgctagacgtcagatcccagttgtcgtcgtcggtgcgggccaccagcccaccctagtctgattgcccggttcctcctcgcgccgcaaacggcgcgcatcgtcaccgggcgtcgtctgattgcccggttcctcctcgcgccgcaaaccaagccggctggtgctgtgctattggcgtcggaacagacggccgtgctggctacagaaccaggcgatgttgccgtccggcccgcgcacgaagttggagcgactgccggtgggcttgttgtcgggtccaaggtcgagcccatagtcgggccgatagaaggcgaggcccagattggcgctgttttggccatccgggttggca

SEQ ID NO: 1977 - DNA, 400 bp, Mycobacterium tuberculosis H37Rv
gaaacacgcttcggggaaccggggggacgtgaacccaaggtcagcggccagcctctcctctataagggtgacgatttcgcatgtatcgatattcgcgcggttctcgccggctgagccggcgatgagcgccctgctggatggggtgttggacgcccacggcgggctgcagcgatggcgcgccgcggaaacggttcatgggcgggtacgcacgggagggctgttgcttcgaacccgggtgccgggcaaccgcttcgcggactaccgcatcacggtgcatgtccaacaggcccggacggtcttggatccgttcccgcgtgacgggtaccgcggagtcttcgagagcgggcaggtgcggatcgaaagccacgatggcgcggtcatcagctcgcgcgcgcacccg

SEQ ID NO: 1978 - DNA, 400 bp, Mycobacterium tuberculosis H37Rv
atcggctcgatggtgagcggtggggtggtgatgggtggggtggtgatttgggggagggtgaagccggtgaggttgatggggtcgatggtcagcggtggggtggtgatgggtggggtggtgatttgggggagggtgaagccggtgaggttgatggggtcgatggtcagcggtggggtggtgatgggtggggtggtgatttgcggcagggtgaacccgccgacgccgatcgagttgatggttagctccggggtgatgatttcctgggtggtgatctgcggcagagtgaagccgcccacgccgatcggagggatcgcgaactccggggtggtgatagctggggtggtgatctgcggcagggtgaagccatcgacgttgatagcggggacatcgatcccgggta

SEQ ID NO: 1979 - DNA, 468 bp, Mycobacterium tuberculosis H37Rv
tgagtatgtatcgcaggtagactaaagccaccgattgtgatacccgcgggtatcgtcagctgcggaatagttacttccggaatctgcaatggcggcaaattaaaagcacccaccgtaatgggcgggaccgtcaccggcggaatggctacggaaggaatactcagcggaggcaactgaaagccgcttacggtgatgttggcgggtgtggtggcggccgggatgttcaacgacggcaacgtcaacccgggcaggctgaaggcgccgacggtgatgttggctggtgtggtggcggccgggatgttcaacgacggcaacgtcaacccgggcaggctgaaggcgccgacggtgatgttggctggtgtggtggcggccgggatgttcaacgacggcaacgtcaacccgggcaggctgaaggcgccgacggtgatgttggctggtgtggtggcggccgggatgttcaacgacggc

SEQ ID NO: 1980 - DNA, 468 bp, Mycobacterium tuberculosis H37Rv
gggatgttcaacgacggcaacgtcaacccgggcaggctgaaggcgccgacggtgatgttggctggtgtggtggcggccgggatgttcaacgacggcaacgtcaacccgggcaggctgaaggcgccgacggtgatgttggctggtgtggtggcggccgggatgttcaacgacggcaacgtcaacccgggcaggctgaaggcacccacggtgatgttggctggtgtggtggcggccgggatgttcaacgacggcaacgtcaacccgggcaggctgaaggcgccgacggtgatgttggccggtgtggtggcggccgggatgttcagcgacggcagcgttattgccggcagactgaaggcgggaaccgatatccccggtatttgcagcggcggcagagtcagatcaggtgtcgtaatactgaactgcaggctgccctgccccacgccccggtagaagacgccattgttcatg

SEQ ID NO: 1981 - DNA, 401 bp, Mycobacterium tuberculosis H37Rv
ggcgccctttgcaccggatccgccggcgccaccgttgccgatcaaccagccggcatcccctccgttggccccggtgccgggagcaccgttagccccgttaccgatcagcggacggccggtagcggccaggacgggcgcgttgatcgagttgagcagcggcgtcacggcggcggcctcggcggccgcataggcgccccccccggtggtcagcgcctgcacgaaccgaccatgaaacgccgccgcctcggcgctcgccgcctgataggcccggccgtgcgcgccgaacaacgcagcgattgccgccgagatctcatcggcaccggcggccagcaggctcgtcgtgttggccgccgcagccgcgttggccccagcgatcgtcgagccgagatcggctagatccg

SEQ ID NO: 1982 - DNA, 401 bp, Mycobacterium tuberculosis H37Rv
cggccatcggccccaccctgctgcacgactggattcagttcggcggctcgacgatgttcggagcggccatgcggatcttgccgcacatttcgataacgcatagccccgcctacaatctgatcctgtcgaatgtgcccggaccccaggcccagttgtactttctgggttgccgaatggactcgatgtttcccctcggccccctccttggcaacgcgggcctcaacatcaccgtcatgtccctcaacggggaactgggtgtcggcattgtctcctgccccgacctgctgccggacctgtggggcgtggcagacgggtttcccgaggcgctcaaagagctgctggagtgcagtgatgaccagccggaaggcagcaaccaccaggactcctgagtcgtacgttca

SEQ ID NO: 1983 - DNA, 400 bp, Mycobacterium tuberculosis H37Rv
ccgaccgatggcaccgtccagggggtgggcggcttcggcggtcagggcggcaacggcgggcagagcggcttgttgtttggcaacgcgggagccggcggggcaggcgctgccggcggagccggcaccggcgacaccgagagcttcggcggccacggcggggccggcggtgatggcggcgctgttggcttgatcggtaacggcggggccggcggcaccggatctcccggcgctgtggtgggtggtaacggcggcgtcggtggtctgggtggcgccggcagtcccgggggtctgttgtacggcaccgggggggccggcggcaatggcggaccgggtggtgacggtggtactggcgcgacggtgggctttgccggctccggcggtttcggcggtgcggggggca

SEQ ID NO: 1984 - DNA, 408 bp, Mycobacterium tuberculosis H37Rv
agttcttcgcctcgatcgcacagcagctgaccttcggcccagggggcacaacggctggctccggcggagcctggtacccaacgccgcaattcgccggcctgggtgcaagccgggcggtgtcggcgagtttggcgcgggccaacaagattggggctctgtcggttccgccgagctgggtcaaaacgactgcactgaccgaaagcccggtcgcccacgcggtgagcgccaaccctaccgtcggttcgtcacacggaccgcatggcctgctccgcggactgccgctagggtcgcggatcactcggcgtagcggcgcctttgcccaccgatatgggttccgtcacagtgtggttgcccgcccgccatcggccggataacgccatgacctcagctcggcagaaatgacaatgc

SEQ ID NO: 1985 - DNA, 400 bp, Mycobacterium tuberculosis H37Rv
gtgccactcccggcgttgccgccgttgccgccgttgccgaccaggatggcaccgccgccagcgccgccgtcaccgcccttggcaccggtgccgtttcctccggcgccgccgtcaccgccgtcgccgatcagcccggctttgccgccgagcccaccggcgcccccggcaccgccgaagccgaatccgccggcgccgccggcaccaaacagcaggcccgcagtgccgccgtttccgccggcgccgcccaccccggtagcgccaccgccgagtgcgccggcgccgccggccccgccggcgcctaccagcaggccggcgttgccgcccgccccgccggcaccgccggtagtggacccgaccccacccgcgccgccggcaccgccgtcgccccagagcagggcgg

SEQ ID NO: 1986 - DNA, 502 bp, Mycobacterium tuberculosis H37Rv
ggccggtctgctgattcccgacgaaagtgacgaggaggccaccaccgctgttcgcgaggacgaggtggagaaattcaaagagtttctcgacagtgtgtcacctgacgatttcaaggccacctagcgcggcgacgatgcgcgccgggacggcgggctgaggaggcgcgcgataaggccgagcgcggcgacgatgcgcgccgggacggcgggctgaggaggcgcgcgataaggccgagcgcggcgacgatgcgcgccgggacggcgggctgaggaggcgcgcgataaggccgagcgcggcgacgatgcgcgccgcgacggcgagcatccattatttgccggccagcaacgtcacggctgcgtctcatctctggctgcaattgtcgacacgcctagcggttagtgcctaatgcgcccggcgaccgcgatactttgatcacgacctgatagttaaccgggagcatcgcgcccatcgaacagcgtatgctctctaacactcgggccc

SEQ ID NO: 1987 - DNA, 537 bp, Mycobacterium tuberculosis H37Rv
ttgccgatgccggtgggggcggcaccgacggagccgccgtcgcccccgttgccgatcagccgggcgtcaccgcccgctccgccgtcggcggctcccgatgggacattgccgccgttgccgccgttgccgtacagcagtccgccggtgccgccggtgccgccggccccgcccgcgaagccggccttgccgagcccgccggccccgccggccccgccatggccgaacagcccgacggcggctccaccgggcccgccgatcccaccggtagcgccgacgggtccggtaccgagtccgccggcaccgccgttgccgccgtcgccgaagagcagtccgccgaccccgccggcaccaccggcaaggccggtcgccccgggcccgccgatgccaccgttgccgccgttgccgatcaaccctgcatccccaccggcgccgccgggctggccgatcccgccgttgccgccgttgccgccgttgccgtacagcaacccgccgggcccgccgggctgtcccggcgcgccattggcgccatcaccgatc

SEQ ID NO: 1988 - DNA, 400 bp, Mycobacterium tuberculosis H37Rv
atccttcggctgcaccccaaccagccgcagtatcgcgttggcgcagttgttgtagaacgcgatgaacggccgggcgaggcgcacgtagaccaggtacggcgggaccagcaacatcgctgttcgctccggaccagccaaagcgatgttcttcggcaccatctcaccgagcaggacatgcagcgccaccacgatcgccaacgacaaggtgtgcagcagcgccggcggtacaccgctcagcccgaacgacagctgtagcagcttgacgactgccggttcgccgacccggccaagcaggatcgaggacaccgtaacccccagctgtgcgccggtcagcatcgccgggagctgttcgcccgcccggatcacggtgacggcagtggccttgccctgctcggccagc

SEQ ID NO: 1989 - DNA, 401 bp, Mycobacterium tuberculosis H37Rv
cttgcctggttcgtcgatccggccgtaggtgtgtgcgccgaagaagtcgcgctgggcctgggtgagtgcagcgggcagccgcgcggtgcgcagcgcgtcgtaatacgacagggccgacgagaatcccggggtcgggatacccagttgggccgccgtcgacaccacacgccgccaactgtcgatcgccgattcgacggcgccgcggaaatacggggccacaatcagactggccaggttcgggctggcgtcaaaggcttccttgatgtggttgaggaacttcgcccggatgatgcagccgccacgccagatggtggccaggtcgcccggcgtgatgtcccagccgaattcggcgctgccggcctggatctggttgaagccctgagcgtaggccacgatcttgg

SEQ ID NO: 1990 - DNA, 406 bp, Mycobacterium tuberculosis H37Rv
ggcgggtccgccgggcatgatcgacggcccgttcaacgcgccctcttcgccgccggagatcccggccccgacgaagtgcaagccccgctcacgcatcgctttctcgcggcgcatggtgtcggtgtacaacgcattgccgccgtcgatgatgatgtcgccgggttccatggcgtcagcaagttcgttgatgacagcgtcagcgtcagtggcctctccggccttgaccatgatcagcacccgacgcggtttttccagtgcggcaagaaattcggggatcgtttcactgcgcacgaacttgccgtctgagctgtgctccttaagcagcgcgtcggtcttggcgaccgaccgattgtgcactgccacggtgtagccgtgccgggcgaagtttcgggcgatgttggaaccc

SEQ ID NO: 1991 - DNA, 401 bp, Mycobacterium tuberculosis H37Rv
cgtactccggcttactactcgctgtcgtatccaaaccggcgggcggccgtaccgggcctatgcacccggctcgcaaacattacacgctaacgcttgctaaattagggcagccttgcctatcattacttcgtcgagccacaacgaccgcggccgagtcctgagggctgcagtgacccccggtcgactcgatcggcgagccccgtgccttggtgcacggggctcgcccgttggtgtagacacaaggacgtgcagccatcgccggactcacccgctccgctgaatgtcaccgtgccgttcgacagcgagttgggtttgcaattcaccgaactgggtcccgacggggcccgagcgcagctcgacgtccggcccaagttgttgcagctgacgggcgtcgtgcacgg

SEQ ID NO: 1992 - DNA, 401 bp, Mycobacterium tuberculosis H37Rv
gatccgatgatcacaactcgatgcctacgaggtggttgcgctgtgggttcttgctggggactcatgttccgctgctcctgacggggtcacctcgatgagcgagttcagttagctactacggtagtcaacccgaccgctgcaggcccagttgaggacatgtgtcatcagccacaccacagcgtgcctgcgtcaccggcccccggtggctacacacccagcagcgggcgcagcgcttcagcggcggtggtgatgaccccgggcagatagccgtgcggagccaagttgatgattaatccgtcgacaccggcatcgagcaccttggcctgaatttggtcggcgatctgtgccgggctgcccaccaccacgcgaccgctcatctccgcgggaatcgcatctggcga

SEQ ID NO: 1993 - DNA, 400 bp, Mycobacterium tuberculosis H37Rv
cgtcgtcggggcattcggcgccggcttggtccttaacgcgctgggcgtcgacgtcaaccatggcgggtactggttcaccttcttcgtcgccctgggcggggctgtcgtcctgctgtggatcgtcggcatggtgcgcaagacctagcgccaaactgttgtcggccatgcaaattgagtgtgactgcggcggccggcgacggtagcggcatgatggagtgatggtctcaccggcgaccacggcgacgatgagtgcgtggcaggtgcgtcggcccggcccgatggacaccggcccgctcgaacgagtgaccacccgggtgccgcgcccggcgccatcggagttgctggtggccgtgcacgcatgcggggtgtgccgcaccgatctccacgtgaccgaaggtga

SEQ ID NO: 1994 - DNA, 400 bp, Mycobacterium tuberculosis H37Rv
ccgtccctgcgttggcccgaccgcccaaaccggtcatcgactaccttgggatcctggtcatcgctgtggccacgaccgctttgatcatggccacaagttggggcggaaccacctacgcctggggctcagcgaccattgtcgggctgttgatcggggccgcagtggcgctgggtttcttcgtgtggctggagggccgcgccgctgcggccatcctgccgcccaggctgtttggcagcccagtatttgccgtgtgctgcgtcctgtccttcgtggtcggattcgcgatgctgggtgcactgaccttcgtaccgatctatctggggtacgtggacggcgcgtcggcgaccgcgtcaggtctgcgcacgttgccgatggtgatcggcctgctgatcgcctcgac

SEQ ID NO: 1995 - DNA, 400 bp, Mycobacterium tuberculosis H37Rv
tcatgtctcggatgttgcggcgctgacgcagccagcccccgaacacccggtagtacacggtggtcaacacggacggggggagccgaaacgactcagtgacctcggtgccgtcggcggtgggcgtcaaacgataatgccaattgttcaccggtctgtcgccgagcagcacagcaaacccgaactcacggcccggttcgcataccgtccagtagaccggcccgatcccgttgcgccggacatgcccgcggaatcgagcgccaagcgcggggccggtggcaccgtcaagccactcggcctcgaaggtttccggcgagaaccggccggtattgcggacatccgcgatcaatgtccagatcttgtccggcggcgctgccatgtgaactgtggccgaaccttccat

SEQ ID NO: 1996 - DNA, 400 bp, Mycobacterium tuberculosis H37Rv
aatgacagccagccgatcactcgagtgctagagcacatacccggcgcttacggtgactcggcacccccagctgagtagtcggaggccgccgtagccggttgcgaaacctgttcgcgcggacccatgtcgaggcgaagcggtgggtactcgtcgcgcatcagcgtggtgtatgcgcggacccgcaacgcccaccggtttacaggttgtatagccctatggggtaccggccggtgaacaggagcgccaccacggcgacgagcagcaggatcaccagtagcgaaggccacattatgccgacgcggtcgtgggggtcgatcaggaagactcgccaaccgctggagaggaagaccgccaggatcaggtagtgggggatagcaagtagccaccacttaatcagcac

SEQ ID NO: 1997 - DNA, 401 bp, Mycobacterium tuberculosis H37Rv
tcgccgtgaccgccgccggcatctgcggatccgatctgcatttctacgaaggcgaatatccgttcaccgagccggtggccctcggtcacgaggcggtaggcaccatcgtcgaggccgggccacaggtgcgcaccgtcggagttggcgacctggtcatggtgtcttcagtggccggctgcggcgtctgcccgggatgcgaaacccatgatccagtcatgtgcttctccggcccgatgatcttcggcgccggcgtgcttggcggcgcacaggccgatctgctggcggtgccggccgccgatttccaggtgctcaagatccccgaaggtatcaccaccgagcaggcactgctgctcacggacaacctcgccaccggttgggcggcagcccaacgagccgatatt

SEQ ID NO: 1998 - DNA, 400 bp, Mycobacterium tuberculosis H37Rv
cccgtgcccgcactgacgtgcctgttgcgaagcatcacgctgcgaatgaccatggcaccggtacaacgaacctggccggaactgatcccgttgctgcagtcgggccgactcgatgtcgatggcatcttcactaccaccctgccgttggacgaagcggccaagggctatgcaaccgcgagggcgcgctcgggtgaggagctaaggttctgcttacgccctgacagccgtgatgtactgggagcgcatgaaactgtcgatctttacgtccacgtccggcggtgtcagtccgtagccgacctgcagctcgagggtgctgcggacggggtcgacggcccatccatgctcaactagccactccacgggatcggtcttgtcgtcgtaggtgagcgcggagaaattc

SEQ ID NO: 1999 - DNA, 400 bp, Mycobacterium tuberculosis H37Rv
aggacaatcaagcggctggcaaggacacagaccgatggctcgtgatccagttgtaccgagggtgcgaacagcatgagtggcgacgacgccgggccgggcgaggtcagccatgcccgcggcgtcggtgggccgggcggagccggaggcgccggtggccggggtggtgccggcggtcgcggcggggcgggcggtagaggcggagatggcggcataggcggggcagcgggccccggcggtcaacccggccagggcggggtgggcggcgcacccggccccggtggaacccccggcgaaccaggtcagcccggcaaaccaggacaaccggggcaacccggcagcccgggacattagcgcgtgcgggtggcgtcgtcgcgcatgagcacgcatagccgccatctgc

SEQ ID NO: 2000 - DNA, 400 bp, Mycobacterium tuberculosis H37Rv
agatcaagcggctcaacgccgcccgcttccagctcgacatcatgcgggtgcccggcatcatcgtcgcacgcaccgacgcggaggcggccaacctgatcgacagtcgcgccgacgagcgtgaccagccgttccttctcggcgcgaccaagctcgacgtaccgtcctacaagtcctgtttcctggcaatggtgcggcgttttacgaactgggcgtcaaggagctcaatggtcatcttctctatgcgcttggcgacagcgagtacgcggcggccggcggttggcttgagcgccaaggcattttcggcttggtctccgacgcggtcaacgcgtggcgggaggacggccagcagtcgatcgacggcattttcgaccaggtcgagtcgcggttcgtggcggcctgg

SEQ ID NO: 2001 - DNA, 412 bp, Mycobacterium tuberculosis H37Rv
acgcccgacgccagctgcccgacgttgtagattcccgagactccgccttgcagcgcgttcggcacctggttccagaggcccgaaatgccgggcccgacgttgccgaagccggatgcgcttccatcgccactgttgaagaagcccgaagacggggtggtggtggagtttccgaagcccggggcgctcgtgatgttgatcgggatgttgatcggtcccaagccgccgttggcggtcaagttcaggggggatccgggaatggtgaagccggggatcgtaaccgggctcgtgcccccgctcaacggaacattcaacccaaacggattaatcgcgaaaccagggatcgtaaccgggctcgtgcccccgctcaacggaacattcaacccaaacggattaatcgcgaaaccagggatcg

SEQ ID NO: 2002 - DNA, 400 bp, Mycobacterium tuberculosis H37Rv
ttgaagaagcccgaagacggggtggtggtggagtttccgaagcccggggcgctcgtgatgttgatcgggatgttgatcggtcccaagccgccgttggcggtcaagttcaggggggatccgggaatggtgaagccggggatcgtaaccgggctcgtgcccccgctcaacggaacattcaacccaaacggattaatcgcgaaaccagggatcgtaaccgggctcgtgcccccgctcaacggaacattcaacccaaacggattaatcgcgaaaccagggatcgtgacagcgttggtagcaccgctcagcggaatattcaaaccgaacggattaacactgaatccctggatgccagactccagggtgccgccggccagcgtgacgcctaatacgaatgtgctaa

SEQ ID NO: 2003 - DNA, 459 bp, Mycobacterium tuberculosis H37Rv
aatgtgctaagcgggatggggccgatgtagcccgtgaagataccagcgacgttaaacggaagttcgttgagagtgatgttgaccggtatcctgatgttaatcgtaagggggatgcgggaaatagggacgccgggaacggtgatcggaccgacaccacccagcgcgttcaggctcaacggaataccaggaatagtaatatcaggcaccacaatcggaccgacaccacccagcgcgttcaggctcaacggaataccaggaatagtaatatccggcaccacaatcggaccgacaccacccagcgcgttcaggctcaacggaataccaggaatagtaatatccggcaccacaatcggaccgacaccacccagcgcgttcaggctcaacggaataccaggaatagtaatatccggcaccacaatcggaccgacaccacccagcgcgttcaggctcaacggaata

SEQ ID NO: 2004 - DNA, 400 bp, Mycobacterium tuberculosis H37Rv
gccggaagtgagtagccatccgggaacaccgtaaacgggcctaaccctccgcccacatcaatacccaacgggattgccggaagtgagtagccatccgggaacaccgtaaacgggcctaaccctccgcccacatcaatacccaacgggattgccggaagtgagtagccatccgggaacaccgtaaacgggcctaaccctccacccacatcaatacccaacggaatagccggcaaactataaccacccgataagaaggtgatgggaccgatttgaccactcactgtcacgtaatctggagggaatccggggaaaaatggcggaatcgcgggaatctcaggagtgcctagctgtatcgatatgctacccgggcctatgctgccaacggtgggatttacgccga

SEQ ID NO: 2005 - DNA, 400 bp, Mycobacterium tuberculosis H37Rv
tgcaaggcagtgatgttgttcggaatgaacaccaccaaattagttatcgtaatgccgttaaggctaaaggtgggaagattgatgacaccagaatttgcttgcgtggctatgccgggagtgctaaagccgcctatacttatttggggtgtacttattaacggggtgtgtatcgtgggtagcgtaaatccgccgacagtggtgccagccggaatcgtgatcggcggaaccgtcaccgacggaatactcagcgtcggcagattgaacgcacctagcgctgtgccagccggaatcgtgatcggcggaaccgtcaccgacggaatactcaactgaggcaagttaaacgcacctaccgtgatgttggctggtgtcgttgtagctggaatcgtcaacgacggcaccg

SEQ ID NO: 2006 - DNA, 401 bp, Mycobacterium tuberculosis H37Rv
taaccggttcgccggggtgttctggagcgaattgtccagcgggggtgtggtgatcgccggggccggcgcctggctggattgccgcccgtacgcggagatcccggcgggggatcacctgatcgccctgctggagatctgcgcggtgcgcgccgatcccgagacaccgccgctggtgtttcacggtagccggttccgccggttggagtctcgatgaagacgaccgatgtgcgggtacgtcgtgcgatcacggcgatggcgggcggtcacgccgtggtcctgaccggcgaccccaatggcgatggctatctcgtcttcgccgcccaggccgcgacgccgcggctggttgcctttgcggtccggcacacctcgggttatttgcgcgtcgcgctgccgggcgccga

SEQ ID NO: 2007 - DNA, 400 bp, Mycobacterium tuberculosis H37Rv
tgatcgtggtgcctcgccagcgtgactcgagccaacggcttgaccggtgatgcgcctgtcggccgccaaggcagcagagcacatcgccccgcgctataggatactagcaagatacatcatagccaatatatgccagtttgcattgctatttaccgatcagttgtccaagcaatcgcgtattggctatggacatcagcggttctgccgcgtacgctcaccaatgtcaccgatcgtcgacctgtccggggggccagcgtgcgccacctcacccaacggcccagcatcgaatccagctggtgcgccgcgccatggtaatcgtggccgacaaggcggccggtcgggtcgctgatccggtcttgcggccggtgggcgcgctgggcgatttcttcgcgatgacgct

SEQ ID NO: 2008 - DNA, 409 bp, Mycobacterium tuberculosis H37Rv
tcgcgggccggcatcttcgccgtcctaactcgggaaatagcggttgtcactatctgagcgcagctatctcatttgcggagaactagccctgatcaattcctgcctcggttacgtgtgtcatgatcagccggccagttcgaggttgaggtgaccttcacatagtgaagcctcccgggtttcgtgcgcaccttctttcgagggaaggacgccacgctgagctgcgagttcgtcgccgagcatcgagcccggttcgaggtcgctgcgatctgtcgcgtgctgtgtgggcagggctgcagatcacccggagaaccttctacgcctgggcagcgtcggccgccgtctaggcgtgccctgcgggagatgacggtcaccgagcccctggccggttacgacgggcccgataccgatg

SEQ ID NO: 2009 - DNA, 401 bp, Mycobacterium tuberculosis H37Rv
atcgatgtggatcatggcgtcgaactggtcggcgggccgcacgtgcaagtagtgactttgccgttccgttgccggtagataaacgacgccgatggcacgtcccaaccggacaacgtccagcggggcttcggcgtcgcggcttagccgcgctgacaccaggaaactgtctgcagtctggtggaagagctcctcgacactgccgtgcagtgccggccgaaccgctttgcgttgggcgataccaccccattcgctggccgcggtgacggtgcccgtgtacgtgctgaatccgatgctgcgcgactcgtcaccgtatcgctcacggactatctggccgagggtgagctgcccgtcggcccacacctcggtagcgcgtgcgtcacccacgtgggagttatgagccc

SEQ ID NO: 2010 - DNA, 400 bp, Mycobacterium tuberculosis H37Rv
accgcacacctgcgcggcgtgcgcggtgatggttaccgcgaaggggtgggtggcgtcgacgacggcatcgatgcgctcctctcgcagccaaccgcgcagcccctcgacaccgccgaacccgccgatgcgcaccggaccgatcggcagggcagggttgggtacccggccggccagcgagctgacgatctcaacgtgtgggtgcaactctttcgccagcgcacggccctcggcggtgccgccgagcaacaacacccgggtcactgtgcataccgaccgtgccgtgccaccgaatataggtagctgtcggtaaagccctcagcggtcagcacgtcgccaacaacgatcacggcggtcctggtgatcttggcatcgtgcatccgcgcggcgatatcggccaacg

SEQ ID NO: 2011 - DNA, 400 bp, Mycobacterium tuberculosis H37Rv
ttggagtcaccgcgaccgtgctcggtcagcagcaccgccagcgcctgcggggtggaccgatcgccggacagcacgatggcccggccgccgcggcgcaccgcggtgtgtggttgcgcggtgaccaggctgatcacctcggtgtcatacacgttccagcccatccgggcgcacgccaacgtcaccgcggacacgtgcggcaacacggtcacgttgtcgtggccgaacagccggatcagggtggagccgataccatgcaacaacgggtcgccgctggcaaccacgtgtaggtcagccccatccggtgacaggccttgcaccgcgggcagcatcggcgtcggccactcccagcgctcggcggtgacggtatcgtcgagcagggcaagttgccgtttcgagccgt

SEQ ID NO: 2012 - DNA, 2419 bp, Mycobacterium tuberculosis H37Rv
gtggccgaacagccggatcagggtggagccgataccatgcaacaacgggtcgccgctggcaaccacgtgtaggtcagccccatccggtgacaggccttgcaccgcgggcagcatcggcgtcggccactcccagcgctcggcggtgacggtatcgtcgagcagggcaagttgccgtttcgagccgtaaattactgtggccctgcgcaattcggagcgagaatgctcggagagaccggtcatgccgtcggcgccgatcccgacaacgatgatcatcggcgccgctctcccccgcaagcgggcggtacccccaccgcatcgctgcgctctgcatcgtcgcggatcatcgcggcatcctgcgccagacgaaccggggaagcaaccgcagcgcaacaaacattggccgcagcgcccacggaatccacaccacgcgcttaccgttgaccagcgcacgcgcggtcgcggcggccacccgctccggggtgaccgacaggggtgcgggcgtcatgccctcggtcatgcgcccgatgacgaatcccggccgcgcgatcagtaaccgcaccccggtgccgtgcaacgcatcggccaggccgctggcgaagccgtccaggccggctttggccgatccgtagacatagttggcgcggcgcacccgaatcccggcgaccgaggagaacaccaccagcgatccccgtccggcggtgcgcatcgccgctgccagatgagtcagcaggctgacctgggcgacgtagtcggtgtgcacgatggccaccgcgtgcgccgcgtctgtctcggcgcgggcctggtcgccgagtatcccgaaggccagcaccgcggtgccgatggggccgtgctcggcaacgagcgaagcgaccaacgggccgtgtgcggccaggtcgtcggcgtcgaactcccgggtgtgcaccgctatagcgccagctgcgcggagtgcggcggcctggtcggcgagttgatcggcgttccgcgcggccagcaccatcgtcgccccggcagccaggcgtcgcgcgagttcgccgccgatctggctgcggccgccgaaaattactaccggagcagcgcccgtgtcgtccacggctgcgattattgcctgcgctagcgtgagtggcgatggtcaacaccactacgcggcttagtgacgacgcgctggcgtttctttccgaacgccatctggccatgctgaccacgctgcgggcggacaactcgccgcacgtggtggcggtaggtttcaccttcgaccccaagactcacatcgcgcgggtcatcaccaccggcggctcccaaaaggccgtcaatgccgaccgcagtgggcttgccgtgctcagccaggtcgacggcgcgcgctggctctcactggagggtagggcggcggtgaacagcgacatcgacgccgtgcgcgacgccgagctgcgctacgcgcagcgctatcgcaccccgcgtcccaatccacgccgagtggtcatcgaggtccagattgagcgcgtgctgggatccgcggatctgctcgaccgggcctgacaaccgaggtcatggcggcagtaggtaatgcacccaggcgccaccggcgggcccggccacggcgtgcagacgggcgttctgattgcccgttcggggcagggtaaagtccgcgccgatggctgtgcaggctagggcagccccggcgaagaccacgggtgccggcgtcacggtccacctgcctgccgcgtcccgacaggccgcagggtgtgggtcaccgcacgatgcggcgacccagcggccatccgcgccctgcagggcgcatgctccggcaccggcacgcggttcgtccggtgcccagctccacaacgacgcctgaatgcggccgtcttcggggagcagctgatcgaagccgaacagattgaccccgcaatcggtcatcgccggcaccttcggcggggtaagcgcctgcggattggccggtggacgggtcgggttggccaacgccgtggccagcgtggagtcctcgtaatagcggaccagtcgccaagcgtagacaccgcggccataggtggcatcgcaggccgggtatggccggtagccggagttcgagccgctttccagctcaacgccgctccagtcgaagacggcggccgaccaacctggcgcacaagacccgacgagcacggctcgtgcgccggatgcgcggatttcctcccgcgacacgtcgagtggaagcgggacacagccgttggtggcacgccgggccgggttgggacggtagataaggcttgttccgtccgcacgccgcaacacttggtcgagggtagccaccaccgactcatacgccgacgcgttcttcagctggtcctccaggtagagcaggatgacctcctcggtatgcccgggtgcgttcaaccagttggcgatctgcggcagcactgtggcc

SEQ ID NO: 2013 - DNA, 400 bp, Mycobacterium tuberculosis H37Rv
gtacgccgccgcgacgcactgccccgcatcgcccaagccgtagtagtggccgccacccgcaactacggcgtccccgacaacgaaaccgacctactgcggtcgcccaggccaaggtggccaccaaacgctgctggcatgcaggtggagtgcacagacacggcagctgcaatagccttacgcgggtgaccaacaccccccccacccaccacaggacaatggacaccaacccaccccccagcgccgccgcgttcacgcaattggccgttggcggcggtggccagcgtcgcgattgccgcggttgtgctgggtgccgcagctttaatcgtggcactgacgcgcccgacgaacagcggtccagccaccgccgctggaacgaccgccgagccgacatacaccgcag

SEQ ID NO: 2014 - DNA, 400 bp, Mycobacterium tuberculosis H37Rv
ccaggggcgagctcagttacggcccactccacgaggggggaaatgcggcccgtaaatcggtctatcgacgcctggttcagctatggcaagcgcgccgggctgttaccgacggtgacgtcgacctgcgcgacgctcgcacgctgctgaccgatctggacagcattttgcgtgagatgcgcacggccgcaaccattcaacagagcggaacggcgggcgatggcggcggcggtcgtcgccaagattcgcggcgacgcaatgggcctcgacgcccagcgcgacgcggtacatcgcgcggccgccgatgcgctccacgcgttgcaatcggttggcatacaccaataggcgaccctttggcagttgagggtgtagaggagatcggcgcgtcgttgccggggcggga

SEQ ID NO: 2015 - DNA, 440 bp, Mycobacterium tuberculosis H37Rv
tggcaagatagcccgcatgcccgcacccgatccgatgcgtggcgacccgccgcacccggctccgccgcgcttgcgatcgccactggacccaacaagtggcgacccgctgcacccggctccgccgcgcttgcgatcgccactggacccaacaagtggcgacccgctgcacccggctccgccgcgcttgcgatcgccactggacccaacaagtggcgacccgctgcacccggctccgccgcgcttgcgatcgccactggtgctactggacggcgccagcatgtggttccgctcgttcttcggtgtgccatcatcgatcaccgctccggatggccggccggtcaacgccgtacgcggcttcatcgactccatggcggtggtgatcacacagcagcggccaaaccggctggcggtctgcctcgacttggattggcgcccgcagt

SEQ ID NO: 2016 - DNA, 403 bp, Mycobacterium tuberculosis H37Rv
cgttgccgatgagccgcgcgctgccgccgttgccggcgttggtggagccaataaatggcagccccccattaccgccgtcgccgccgccgccgccatcgccgtacagccacccgccgaccccaccgtcgccgccgcgactacctacctggaacaggcgcgcaccgagccctgggtcgccgccgttgccgccgccgccgccgccgacaccaatcagccccgcgtcgccgccccggccaccgctgccgcccaacccggcgaaaccgtcgctggagacgccggtacctgcatcgccaccgttgccgccggaaccggccgcccctccattgccgtacagcagcccgccggcgccaccgaactggccgaagccgccactgccgccactgccgccggccttgccgctccc

SEQ ID NO: 2017 - DNA, 400 bp, Mycobacterium tuberculosis H37Rv
gaccactggccccgtcggcgccgtcgccgaccagcggacgccccagcagcgtctgggtgggcgcgttcaccgcgttcagcaggttctgctgcgcgttggcaatctcggcgctcgcatatgaacctccaccggcgttaagcagttggacgaaccggtcatgaaacgccgccgcctgggcgctgaccgcttgatagctctggcctgggcgccaaatagcgccgctatgcccgccgacacctcatcggcggcgggcgccaacgcccccgtcgtcgggaccgccgccgccgcgttcgctgccctgatggtcgaacggatggccgctaaatccgtggccgcagccagcaatgcctccgggctcgcaatcacaaacgacattgcgcacctcccaccaacccgcgat

SEQ ID NO: 2018 - DNA, 1748 bp, Mycobacterium tuberculosis H37Rv
aactcgcggatgccctcattggcaacgtttgcgcctgccttggggcggccggcagccaccaagtcgagcactttgcggcggaactactcggggtaacacttcggcacggacacggctcgttcgacggacgtcgtgaccagaagtcgagcaaaccgactccactctagctagtgatacaagcttttttgtagccgcgcgatgaaccgccccggcatgtccggagactccagttcttggaaaggatggggtcatgtcaggtggttcatcgaggaggtacccgccggagctgcgtgagcgggcggtgcggatggtcgcagagatccgcggtcagcacgattcggagtgggcagcgatcagtgaggtcgcccgtctacttggtgttggctgcgcggagacggtgcgtaagtgggtgcgccaggcgcaggtcgatgccggcgcacggcccgggaccacgaccgaagaatccgctgagctgaagcgcttgcggcgggacaacgccgaattgcgaagggcgaacgcgattttaaagaccgcgtcggctttcttcgcggccgagctcgaccggccagcacgctaattacccggttcatcgccgatcatcagggccaccgcgagggccccgatggtttgcggtggggtgtcgagtcgatctgcacacagctgaccgagctgggtgtgccgatcgccccatcgacctactacgaccacatcaaccgggagcccagccgccgcgagctgcgcgatggcgaactcaaggagcacatcagccgcgtccacgccgccaactacggtgtttacggtgcccgcaaagtgtggctaaccctgaaccgtgagggcatcgaggtggccagatgcaccgtcgaacggctgatgaccaaactcggcctgtccgggaccacccgcggcaaagcccgcaggaccacgatcgctgatccggccacagcccgtcccgccgatctcgtccagcgccgcttcggaccaccagcacctaaccggctgtgggtagcagacctcacctatgtgtcgacctgggcagggttcgcctacgtggcctttgtcaccgacgcctacgctcgcaggatcctgggctggcgggtcgcttccacgatggccacctccatggtcctcgacgcgatcgagcaagccatctggacccgccaacaagaaggcgtactcgacctgaaagacgttatccaccatacggataggggatctcagtacacatcgatccggttcagcgagcggctcgccgaggcaggcatccaaccgtcggtcggagcggtcggaagctcctatgacaatgcactagccgagacgatcaacggcctatacaagaccgagctgatcaaacccggcaagccctggcggtccatcgaggatgtcgagttggccaccgcgcgctgggtcgactggttcaaccatcgccgcctctaccagtactgcggcgacgtcccgccggtcgaactcgaggctgcctactacgctcaacgccagagaccagccgccggctgaggtctcagatcagagagtctccggactcaccggggcggttcacgattgggccgcccgtaaggaatgcgtcatgagcgacttcgcatcacgggcgaccaatcattaatttgtcaaaccctttgacatgcactacttgtccacattttgtacacgaaatacctaacacactatggtgcacatcacgcacttccacgttccgtattcggtgtacgattttgtcacgcaactaagcgttc

SEQ ID NO: 2019 - DNA, 401 bp, Mycobacterium tuberculosis H37Rv
tagacaaagaggggaccatcagactcgtctacgatggggagcccacgttttcatacaaggaacatcctaagttttgattcgggaacatcctaagaaacggggggcgtcgccgttggagacgtcgcaacgtgtccgcagtcccaagggcaacagtgaagggcccacggtgcgatccccaacacccggctagagtgcgcataatattttcccgcctcggctcaaggcgtgcacccccatcaccgctaaccatgctgtgtatcaacagatttcattgtcccggccgtcgcgcgaccgaccaatagggtgagttccatgtgcgatatcgcctaacagccggctcccgtactcccgtggccgatgtgattattgattacgtggatcaccatgtgggtgatcgcggt

SEQ ID NO: 2020 - DNA, 440 bp, Mycobacterium tuberculosis H37Rv
atgccggcggcggcggcgtatgccagcaccgcctgcgtcgaggtgaggatcgggttggcggtcgggtccgacggcgaggaaatgccgtactcgacctccgttccgataatccgctgcatgccgtagagcctaggcccgccgacgatgcgggccgcgcagcgggccgctgaggaggcgggcatcaagcaacgcccgccgacgatgcgggccgcgcagcgggccgctgaggaggcgggcatcaagcaaggcccgccgacccagaacatcggagcgggccgcgcaggaggtggacaatcaagcagggcccggcgctagggtaggccggcatgagcctttccgtccgtcgccccccggcggcccgagcagcggccattgtggaggctgaaagctggttcttgaagcgtggtctgccctcggtgctgaccatgcggggccggtgc

SEQ ID NO: 2021 - DNA, 427 bp, Mycobacterium tuberculosis H37Rv
tcacggtggtttgacgccacacgttcgccaccgccgcgccgcgcattagggcatcctaatataggttaggctaccctagttattcctgtggtcgaaggaggcagccgaacgtgaccttcccgatgtggttcgcagttccgccggaagtgccgtcagcatggctgtccaccggcatgggccccggtccgctgctggccgcggccagggcgtggcacgcgctggccgcgcaatacaccgaaattgcaacggaactcgcaagcgtgctcgctgcggtgcaggcaagctcgtggcaggggcccagcgccgaccggttcgtcgtcgcccatcaaccgttccggtattggctaacccacgctgccacggtggccaccgcagcagccgccgcgcacgaaacggccgccgccgggtatacgtccgcattgggggg

SEQ ID NO: 2022 - DNA, 408 bp, Mycobacterium tuberculosis H37Rv
ggcaggctccgtacgggctggccggatcccgcgaattggcgtgggtgtcccaaaccgcgtccaacaccgtcattggttacgatctgaccaccggaatacccgtagagaaggtgcgttacccaaccgtgcaacaacccaactcgttggccttcgacgaaacgtcggacaccttgtacgtggtgtcgggatccggtgccggggtccaggtcatcgaacacgcggcgggcacccgatgagcagccgacccgcggcgcggcggacctggttgcctaccggctgggattccgagatgtccgacgagtacgagtgggcgccattgcgcctaccgccagaagtgaccagggtcagcgcgtccacccggctgtccatcgaggccgaataccgcggctgggagctagcacgggtacg

SEQ ID NO: 2023 - DNA, 400 bp, Mycobacterium tuberculosis H37Rv
cctttcctaccactcgtaaccctggcgagccgatcgcccctggcgcgccgggcccgcgtcgtcgccgagctggatttgcttacgtgggctgattgcctggctcctcctcaccccgttacccggggcgcatcgtcgccgagctcgatttgattgcccggctcctcctcaccccgttacccggggcgcatcgtcgccgagctaggttgggccggtgcggggcaatccgatagccttagctgccagccccggtggttggttggtccgagtggcggaatggcagacgcgctagcttgaggtgctagtgccctactaatgggcgtgggggttcaagtcccccctcggacacaacttcttagctctatagatcaaaaccaagccttgacctcgtcaaggactaacg

SEQ ID NO: 2024 - DNA, 400 bp, Mycobacterium tuberculosis H37Rv
ctccatcgcgtaggcgtgcagctcgaacgcgagttggcgcacttcgatatccgcccggatctcgccccggcgttgcgccgtttcgacgtcggccgtgatggcggcgattccggcccgcccggtcgcggcgatgcggtcgcgcaccgggccaggctgtgagtccacgtcggcggccgcggccgcgaaaaagcagccgccggcacgtcgcgttccaggtatccgacccacgcatgcatgagggcgcgcacccggtccaccccgggcggcgctgccatcgcgggagccacgacctcggcttcgaacacgctcacggcggcctcgacggtcgccagctgcagctgctccttggcgccgaaatgccggaacaggcccgacttgctcatgcccagccgcccggcaa

SEQ ID NO: 2025 - DNA, 498 bp, Mycobacterium tuberculosis H37Rv
cgccgttgccgccgttgccgatcaccacggcgttgccgccgttgcccccgttaccaccgtcgcctttaacgcctggggggccgtcgccgccttccccgccgttgccgccgcgcccgccgtcaccgatcagcctggcgttgccgccggcgccgccgtcaccggcattacccggcgtgggagcctgtccgccgttgccgccgtccccgccgccgccgccgctgccgatcagcccgccgatcccgccggcaccgccgatgccgccgtccccgccgctggtgccggccgacgagaagccgccgttgccgccgcgcccgccgacgccgccgttgccgtagaacagcccgccgttgccgccggccgcgccggcgccgccggaccccgcatcggcaagggtggagctgttgtcgttgcccccgttgccgccggcaccgccgttgccgccgttgccgatcagcccgacgtgcccaccggccccaccggccccaccggccccaccgg

SEQ ID NO: 2026 - DNA, 418 bp, Mycobacterium tuberculosis H37Rv
gccgacgagaagccgccgttgccgccgcgcccgccgacgccgccgttgccgtagaacagcccgccgttgccgccggccgcgccggcgccgccggaccccgcatcggcaagggtggagctgttgtcgttgcccccgttgccgccggcaccgccgttgccgccgttgccgatcagcccgacgtgcccaccggccccaccggccccaccggccccaccggcgccgccggccccaccgctgttgccgtggccaccgttgccgccgtgccccccgtcgccgccattaccgatcagggcggccccgccggcaccacccgccccaccgctggcgccggtgttgctgagcccgccgttaccgccgtcaccgccggcgccaccgttgccgatcagcccggcggcgccgccggcaccgccgtttccgc

SEQ ID NO: 2027 - DNA, 1748 bp, Mycobacterium tuberculosis H37Rv
tcccccactttgccccataactggggtatcaaagcggcgttttgccgtctctgtaccactgaagcgcgcggctagcccggctacgacctcagaaaaccgcatgtcgccgggcaaatgggtggcaagtggggccaagtggggcacaactggggctcaaaccggactcaatatcgccgacagccggtgacgacccggctgggtgaaccgccccggtgagtccggagactctctgatctgagacctcagccggcggctggtctctggcgttgagcgtagtaggcagcctcgagttcgaccggcgggacgtcgccgcagtactggtagaggcggcgatggttgaaccagtcgacccagcgcgcggtggccaactcgacatcctcgatggaccgccagggcttgccgggtttgatcagctcggtcttgtataggccgttgatcgtctcggctagtgcattgtcataggagcttccgaccgctccgaccgacggttggatgcctgcctcggcgagccgctcgctgaaccggatcgatgtgtactgagatcccctatccgtatggtggataacgtctttcaggtcgagtacgccttcttgttggcgggtccagatggcttgctcgatcgcgtcgaggaccatggaggtggccatcgtggaagcgacccgccagcccaggatcctgcgagcgtaggcgtcggtgacaaaggccacgtaggcgaaccctgcccaggtcgacacataggtgaggtctgctacccacagccggttaggtgctggtggtccgaagcggcgctggacgagatcggcgggacgggctgtggccggatcagcgatcgtggtcctgcgggctttgccgcgggtggtcccggacaggccgagtttggtcatcagccgttcgacggtgcatctggccacctcgatgccctcacggttcagggttagccacactttgcgggcaccgtaaacaccgtagttggcggcgtggacgcggctgatgtgctccttgagttcgccatcgcgcagctcgcggcggctgggctcccggttgatgtggtcgtagtaggtcgatggggcgatcggcacacccagctcggtcagctgtgtgcagatcgactcgacaccccaccgcaaaccatcggggccctcgcggtggccctgatgatcggcgatgaaccgggtaattagcgtgctggccggtcgagctcggccgcgaagaaagccgacgcggtctttaaaatcgcgttcgcccttcgcaattcggcgttgtcccgccgcaagcgcttcagctcagcggattcttcggtcgtggtcccgggccgtgcgccggcatcgacctgcgcctggcgcacccacttacgcaccgtctccgcgcagccaacaccaagtagacgggcgacctcactgatcgctgcccactccgaatcgtgctgaccgcggatctctgcgaccatccgcaccgcccgctcacgcagctccggcgggtacctcctcgatgaaccacctgacatgaccccatcctttccaagaactggagtctccggacatgccggggcggttcaggggcttcccgagactgcgattcccaaacgatgacgcccaaacaaaaagcgggaccgccgatggctgccccgctgccgctggttgcgttcggcttactcgtcgaagcggcgccggaaccgatcttccatacggctggtgaatgagcccccggcccccttggtacgacgctggcgcgaagccccagcagccgat

SEQ ID NO: 2028 - DNA, 401 bp, Mycobacterium tuberculosis H37Rv
gcatgaacgtgacgatcccgactacgtcatctatcaacgcctgatcgacggcgtctggaccgatgtcacgtgtgcggaggcagccaaccagattcgtgccgcggctctcggtttgatttcactgggggtgcaggccggcgatcgggtagtcatcttctctgccacccgctacgagtgggcgatcctcgatttcgcgattctggctgtgggtgcggtcaccgtaccgacctacgagacctcgtcagcggagcaggtgcgctgggttttacaagactccgaagcggtggtgttgttcgccgaaaccgactcacacgcgacaatggtcgccgaactctccggcagcgtgcccgccctgcgggaggtactgcagatcgccggttcgggtcccaacgcgctcgatc

SEQ ID NO: 2029 - DNA, 400 bp, Mycobacterium tuberculosis H37Rv
gttcgccagacggcgagcactagcccggcgacgacccgggtcggcacgacccgggaaggaaccgggcaaatcaagcacagcccggcgacgacccgggtcggcacgacccgggaaggaaccgggcaaatcaagcacagcccggcgacgacccgggtcggcacgacccgggaaggaaccgggcaaatcaagcacagcccggctaactggactggggcgccaccacccggcgcagctgccgagcgtatagccactcgatcaccggcatgcccgcggtgaccaccccggccaacccgtagctgatccaagatggcccgtcgtgaccgaccgccatgaggtaggtcgccgccgccacggcaatcaacgcaatgccaatcgcactggtcaacacgactgtcccgcg

SEQ ID NO: 2030 - DNA, 400 bp, Mycobacterium tuberculosis H37Rv
ctccggcgactgggacgccatcgctgccgaggtcagcgagtacggtggcgcactgctacctcggctgatcacccccggcgaggccgcccggctgcgcaagctgtacgccgacgacggcctgtttcgctcgacggtcgatatggcatccaagcggtacggcgccgggcagtatcgatatttccatgccccctatcccgagtgatcgagcgtctcaagcaggcgctgtatcccaaactgctgccgatagcgcgcaactggtgggccaaactgggccgggaggcgccctggccagacagccttgatgactggttggcgagctgtcatgccgccggccaaacccgatccacagcgctgatgttgaagtacggcaccaacgactggaacgccctacaccaggatc

SEQ ID NO: 2031 - DNA, 400 bp, Mycobacterium tuberculosis H37Rv
tggcacgcgggaccggcggagatgctgcgcgacaagacacgctgggccaagctccaagagctcgggtggacgattgtcccgattgtcgtcgacgatgtcagacgcgaacccggccgcctggcggcccgcatcgcccgccacctcgaccgcgcgcgtatggccggctgaccgctggtgagcagacgcagagtcgcactgcggccggcgcagtgcgactctgcgtctgctcgcgctcaacggctgaggaactccttagccacggcgactacgcgctcgcgatcccgtggcaccagaccgatccgggtccggcggtcgaggatatcgtccacatccagcgccccctcatgggtcaccgcgtattcgaactccgcccgggtcacgtcgatgccgtcggcgaccg

SEQ ID NO: 2032 - DNA, 401 bp, Mycobacterium tuberculosis H37Rv
gcagctgcgcccgtccgccctgtcgggggcagaccacgatgcgctggcgcgcatcgtcggcaccgagtatttccgcaccgccgatcgcgaccggctgctgcacgccggcggcaagtccaccccagacctgctgcggcgcaaagacaccggtgtccaggatgcgcccgacgcggtgttgctgcccggcggccccaacgggggaggacgccgtcgccgacatcttgcactactgctccgaccacggcattgccgtggtcccgtttggtggcggcaccagcgtcgttggtgggcttgaccccgttcgcaacgactttcgcgcggtgatctccctggatatgcggcgcttcgaccggctgcaccggatcgatgaggtgtccggcgaggccgaactggaggccggt

SEQ ID NO: 2033 - DNA, 496 bp, Mycobacterium tuberculosis H37Rv
ggcggaagtccggccatggtgtccagcagcccggtctggtgtccaacgctcaccaggatcgccaaaccggcgctgtcgatggccgcaacaaaacggttgccgaattcttcggtggtctcgagtgctccgctcatctgcgccgctcctcctcatcgcttcgctctgcatcgtcaccggcgcgactcatctgcgccgctcctcctcatcgcttcgctctgcatcgtcaccggcgcgactcatctgcgccgctcctgctcatcgcttcgctctgcatcgtcaccggcgcgactcatctgcgccgctcctgctcatcgcttcgctctgcatcgtcaccggcgcgactcatctgcgccgctcctgctcatcgcttcgctctgcatcgtcaccggcgcgactcatctgcgccgctcctcctcatcgcttcgctctgcatcgtcaccggcgcgcatggtcagcgacgctacaccgtaggttggacaccatgagtcagacggtg

SEQ ID NO: 2034 - DNA, 402 bp, Mycobacterium tuberculosis H37Rv
gtggaactctgatacaccagcagcgccgccccgagccgcgcggcgtgccgggtcagatcggagaaggtcatctcgtagctgatcaacggggcgatatgcaaggagttcaccgccaacaccaccggcccggcgccgcgctgccgatcctttgcggcggccttgctgtagcgggtgatccagccgaaaagcgggcgcagcggagcacatattcgccaaacggaaccaaccgggtcttccggtagctgcccacagcttcgtgcgcgccgacaagcaccgccgacttgtagattcccccgtccggtgccggggcgtcgacgttgaccaacaaatccgcgcccacccgctgtgacagctcggccaggcgagccaggacgtcaggatggcgggtgaggtcttgtccga

SEQ ID NO: 2035 - DNA, 1748 bp, Mycobacterium tuberculosis H37Rv
gccatcgctgctgacctggacggtcagccacatgccatccacaccagctgcgactgcgttggtaatcgccagaacggtgttctcgggaaaatcgcgcgtacccgcgcgatgcgcgacaatcatcgggtcgtcagtctggcccagcggcaaagcatccgccacaccgcaagtccctcccaaggcgatcaccagcgccaccgtgaaccgccccggcatgtccggagactccagttcttggaaaggatggggtcatgtcaggtggttcatcgaggaggtacccgccggagctgcgtgagcgggcggtgcggatggtcgcagagatccgcggtcagcacgattcggagtgggcagcgatcagtgaggtcgcccgtctacttggtgttggctgcgcggagacggtgcgtaagtgggtgcgccaggcgcaggtcgatgccggcgcacggcccgggaccacgaccgaagaatccgctgagctgaagcgcttgcggcgggacaacgccgaattgcgaagggcgaacgcgattttaaagaccgcgtcggctttcttcgcggccgagctcgaccggccagcacgctaattacccggttcatcgccgatcatcagggccaccgcgagggccccgatggtttgcggtggggtgtcgagtcgatctgcacacagctgaccgagctgggtgtgccgatcgccccatcgacctactacgaccacatcaaccgggagcccagccgccgcgagctgcgcgatggcgaactcaaggagcacatcagccgcgtccacgccgccaactacggtgtttacggtgcccgcaaagtgtggctaaccctgaaccgtgagggcatcgaggtggccagatgcaccgtcgaacggctgatgaccaaactcggcctgtccgggaccacccgcggcaaagcccgcaggaccacgatcgctgatccggccacagcccgtcccgccgatctcgtccagcgccgcttcggaccaccagcacctaaccggctgtgggtagcagacctcacctatgtgtcgacctgggcagggttcgcctacgtggcctttgtcaccgacgcctacgctcgcaggatcctgggctggcgggtcgcttccacgatggccacctccatggtcctcgacgcgatcgagcaagccatctggacccgccaacaagaaggcgtactcgacctgaaagacgttatccaccatacggataggggatctcagtacacatcgatccggttcagcgagcggctcgccgaggcaggcatccaaccgtcggtcggagcggtcggaagctcctatgacaatgcactagccgagacgatcaacggcctatacaagaccgagctgatcaaacccggcaagccctggcggtccatcgaggatgtcgagttggccaccgcgcgctgggtcgactggttcaaccatcgccgcctctaccagtactgcggcgacgtcccgccggtcgaactcgaggctgcctactacgctcaacgccagagaccagccgccggctgaggtctcagatcagagagtctccggactcaccggggcggttcaccgcgcccaacatagccgtcttcaccatcggtccccttcaggctttccccaccgtagaaacgtgcgcaatgcgcggcgcacagtatcgaaccgtaccgctgagagccaaccacgatgatttgcccgcaccggcagcgataaagtaagtcgcggtcgggcacgcagcgcagcgttggaaagtgaggcctccgat

SEQ ID NO: 2036 - DNA, 401 bp, Mycobacterium tuberculosis H37Rv
cggcgggccgttgatggcattttgctagtgtcggagcggcaatccgcctatatttctcctcgcctaccagtgagggagccgggcttgactgatccgcgccacaccgttcgaatcgctgtcggagctaccgcgctcggcgtgtcggcactcggggcaactctgccggcctgctccgcacacagcgggccgggttctccccccagtgcgccgtcagctcccgcggccgcgaccgtcatggtagagggacatacgcacacaatttccggagtggtcgagtgccgcacctcgccagcggtaaggacggcgacgccgtcggagtcggggactcaaactacacgggttaacgcacacgacgattcggcctcggtgacactgtccctgtccgactccacgcccccaga

SEQ ID NO: 2037 - DNA, 402 bp, Mycobacterium tuberculosis H37Rv
cgggccaaaccggcatgcgtgagctgccgttcggggtacatgtaacctgtccgtaactacactgattgcgcgacaagggaattagccgcgttggcaggcaacacggaggtgaccggtgcaagcccgtggtcaggtcctgatcaccgccgcggaactggctggcatgatccaggccggcgatccggtgtcgatcctggatgtgcgctggcggcttgatgaacctgacgggcatgcggcctacctacagggtcacctgccgggagcggtatttgtgtcactcgaggacgaactgagcgatcatacgatcgccggccggggccggcacccgctgccgtcgggggctagtctgcaagccaccgtccgccgatgcggaatccgacacgatgtgccggtcgtggtcta

SEQ ID NO: 2038 - DNA, 400 bp, Mycobacterium tuberculosis H37Rv
tcccaggaacgggacgccgtgtgcatcggcgaccgcctgcgcggctgccgtctcctggtcaaccgcgtcgaagccggggttcaccgtcgatacgatgttcaggttgctgatcagagcgttcttcagccagggtcccgccgcctggaaaaagttaccggtatagccaagtgagcgatcgggtgcactacagggttggcagcaaaaacgctgccgccgttcgggatgcaaggaaaagcctggccgttgttcttgtcggagctagacccgtcaccgccgacgaacagttgcggctggcgccccaggtggttcaaccggacgaccggaacgttcctgcacagacagacaggattgccgagcgtgttgatgttgtccagtacaacagaaagcgtctgggcagtag

SEQ ID NO: 2039 - DNA, 400 bp, Mycobacterium tuberculosis H37Rv
agcgccaacacgatcacctcgggtgacggtcttgtccgctcggcggcccttcagtgcccagccaatgcggccgaccccgcggcggccgcattcggtagacaaaggaagtctgacaccgtaggcgcctcgttgatcgcgttttcgccgagaaacgtgaaggccgtttgcccgcccgtgcggatcagctacgatcaaggcgacacatggaccagtcggccaaccatgcgtgtctgcccaccccgctggcgagcacaacagggcgcgggcaagatcatgagatgcctgtcgaagagacctccaccccccagaagctgccccaatttcgttatcaccccgatcccgtcggcaccggctcgatagtcgccgacgaggtgagctgcgtgagctgcgagcaacgtcg

SEQ ID NO: 2040 - DNA, 400 bp, Mycobacterium tuberculosis H37Rv
ctcgctgttgccggatgtccaaaatctgcgggccatctcgacaacggtcgccgaagctgtctatcgggccgccgtccaagacggggtggcttccaggacgcacgacgacgtcaggcaggccatagtcgacaccatgtggctcccggcatatgactaaccgcgcactcgacggtcatcgctgtaggcagcctctcgcttaggtcgctgcccgcggtgtgcacgtcacgcggaaaccatcgccagccggcgagaaacacgacagccagtgttgcagtggcgacgagcaacgccacccgaatgccttcgatgaaatcctcctccgcaatcgcgacggggtcgcgatgctcaatgtgccgccgggggacgattccgcccacatgcgctcgcggattggcactgt

SEQ ID NO: 2041 - DNA, 400 bp, Mycobacterium tuberculosis H37Rv
ccttcccgcaaccgtcccccggaattactgatcaaaccctgggtttaccaacttccgggcatggggcgaaggtcgacagccagaacatggccgtgcgtgatatgggcattcacgggacggagccgctaaggagaccggtacgattcaatctccatatgagcggtgcggcggctgttgtcaggtacgttgaacaccggtggcgatcgggtgccggcaggttggtcttctcctgtgatgcgagcgcgcctccgcgccaaccaccgcgtgcgaagcaggtgctgatgccacagtgctgatgtcacaaggaaccgcgagggggtcccggaccctacatggtgccgggcgaagtccacatgagtgatacgccgtcaggcccgcacccaatcatcccgcggacgat

SEQ ID NO: 2042 - DNA, 403 bp, Mycobacterium tuberculosis H37Rv
actgcccacgttggtaccgccgatgttgccgctgcccaggttgaggctgccgatgttgccgacacccaaattcaaggtcagctcggcgaggccttgtgcagcgccttgtgcagcggccgccggtgcgttagccgcaccgcctagcaagcccgacaagcccggcaccgcctgctgccatggcgccaacgccgccgccgccgccgatgccccaccgtgataacccaccatcgccgccacatcggcagcccacatctgctcataggtggcctcagcagcggcaatcgccggcgcattctgcccaaacacattcgacagcaccaactgcacaaacgcactgcgattagccgccaccaccaccggatccaccatggccgcccgcgccgcctcaaacgcgccggccacc

SEQ ID NO: 2043 - DNA, 400 bp, Mycobacterium tuberculosis H37Rv
cctctcgggctttgtctgcggttttaccggctcggtgcattcgcgcgctagccgatagggtctatcgccatgtccggtgccacggtgggtgcgcgcgaaatcaccatccgcggagtcgtcctgggcgcattgattaccttggtgttcaccgcggccaacgtgtacctggggctaagggttggattgacattcgccacttccataccggccgcggtgatctcgatgggcgtgctgcggttgttcgccaaccactcagtggtggagaacaatattgttcagacgatcgcgtcggcggccggcacgctgtcgtcgatcatcttcgtgttaccggcactgctcatgatcggctggtggagcgggtttccgtactggacaacggcggcggtgtgtgcactgggcg

SEQ ID NO: 2044 - DNA, 409 bp, Mycobacterium tuberculosis H37Rv
cgaacgcggtcgcggccgccccgacaacagagatcctggcggcggggaccgacgaggtgtccaccgccatctcagcgctgttcggcgctcatgcccaggcatatcaggcgctcagcgcccacgtggcggcatttcacgaccagttcgtgcataccttgaccgccggtgccggctcatacatggccgccgaggccgccgccgcctcgcctctgcaggctttgcagctggagctgctcaacgccatcaatgcacccaccctggcgctgttgggacgcccgttgatcggcgacggcaccgatgcggcgccggggagcgggggggccggcggggccggcggcatcttgatcggcaacggcgggaccggcggcgccagcgacttagccgggaccggccgcggcggggtcggcgg

SEQ ID NO: 2045 - DNA, 400 bp, Mycobacterium tuberculosis H37Rv
aggatagggccatgcttgagatcacgttgctcggaactgggagccccattcccgacccggaccgtgccggaccatccactctggtgcgggccggcgcgcaggcgttcctggtggactgcggtcgcggcgtgctgcaacgcgcggcggccgtcggtgtgggcgccgcaggattgtcggcggtgctgctcacccatttacacggcgacgtgcttatcaccagttgggtcaccaacttcgctgctgatcccgcgcccttgccgatcatcggaccgccgggcaccgccgaagtggtggaggcgacgttgaaggcattcggtcacgacatcggctatcggatcgcccaccacgccgatctgacgacaccaccaccgatcgaggtgcacgaatacaccgcaggccc

SEQ ID NO: 2046 - DNA, 400 bp, Mycobacterium tuberculosis H37Rv
gctatcgggcccggacaagaagaacagtggcgggcgctggccgcgaccgagttcagcgggcggatcgaggtcggcaacgacctacaccgagtcgaggtgcacccgcggcgctagcacgccagctatgaccaaccagccccgacaccagggcgatcgataaggcaagaagtagatcgcccgaaccagcgccgggtccgtgctgaccctcgggcgccacacggtcttgcccagcaaaccggtcagcccggacgctcccgcccgccacggtgccgccggccaacgccgatcgtcgaaccccacccggtcactgaaagctgccgcaggcggttggctgatgcaacaccgcggtggcaatacgtgcagcgcgaccggctcatcgcggatctacggcgcaaccgcg

SEQ ID NO: 2047 - DNA, 400 bp, Mycobacterium tuberculosis H37Rv
tgccgagccgagcgcaacacgtcggccaccgccctttcgaccagcagttcttcgtctcccaggaccaggtgcaacggcttagcctcgctcaccccacgatggtgtcacgaagggccgaccagcccggacagcgaccaggcaagcagacatatgacggccaccgccatcgttttgcacatggccgcgcgaaaccagcgccagcgccactgcgcaaccgtgaacacggtggcgccaccgaccagcagtacgccgggcagacctgcggccaccggaacggtcgccgcgggcacacccgacgcccaatgcgccacgcgcaacacccaccacacttcgggcccggtgaaccggatcagcacctgcgcgccggccggccacggcacgaccagcacggccgcaacgc

SEQ ID NO: 2048 - DNA, 402 bp, Mycobacterium tuberculosis H37Rv
atcagggcatggtgatcatcgaagcgcccttccagcgcccgctgcagatcggggatcttcgagcgcatactgccgcgcgccagatcagccagcaccgccgggcggcgttcaccgtcgatgagcgcctccaccatcgcccgcaccgacttgggggtgaccgaggacgccacgctgtcggccttgatccccgcgtcttgaagcacattgcccaggcgctgcagcttcgaggtgcgatgctcgaccagcttgcggcggtagcggatcacgtcgcgggcggccttgatgtcggcgggcggaatcaaccaaccccgcagcagaccgcattccagcaggtgcaccaaccactcggcatccaagaggtcggttttgcggcccggccgttcttcacgtgcccggcattgc

SEQ ID NO: 2049 - DNA, 420 bp, Mycobacterium tuberculosis H37Rv
cgcgccagctcggtcttgccgaccccggcggggccttccaccagcagcggcttgccgagccggtcggcgagaaagaccgccgtcgcggtggcagtgtcgggcaggtagccggtctcggccagccgccgcgagacgtcggcgatgtcggcgaacagcggcgtgggccgggcgggcacggtcacgatcgggtctcctctagcacgatcgggtctcctctagccaacggcgtcaggccggacgggtgtggccggctccccatgcgatccacttggtcgacgtcaattccggtagtcccatcggtccgcgggcatgcagtttctgggtggagatgccgatctcggcgccgaagccgaattgctcgccgtcggtgaacgccgttgatgcgttcaccatcaccgcggccgcatcgatctgttcggt

SEQ ID NO: 2050 - DNA, 403 bp, Mycobacterium tuberculosis H37Rv
ccgaggaaccaggtcaactgggcgacaccctgctcgtcgcgttcggaaaacaccagcttgaccgaatcgtcggtcagctccgtgatgaccgcaatgtcgccaatggcatcggccggggtgacggcctgtttgtaggcctcggagaaggcggcagcgtaatgcatagcgtcggcctgtccgacggagccagccgccgccgccgcgccgatcaaacggtcggcccaggttcgcgcggcttcggtcagcagaccctggatccggatccggttggcttcggaaacgtccaccggcggggcggccgccccttctcctgccacacccacttcgggtagccgcaccatgaaatgcatgagtgcccaaggtgattcactgacccgagcggtgaactccagtcgtgttcccc

SEQ ID NO: 2051 - DNA, 1748 bp, Mycobacterium tuberculosis H37Rv
gcccttgcccaatgctgcgcccaccccggtgaccagccttccccagcaattgacggtgataaacagcgagttgccgggctcccaaccgccgtcgctggtgcgccggcgcgaattgctggccacccggaacttgacgacctcttgatcaccgactttgcggcgctgcaaatcgttgacgatgtgaccgaccacggtcagtgaaccgccccggtgagtccggagactctctgatctgagacctcagccggcggctggtctctggcgttgagcgtagtaggcagcctcgagttcgaccggcgggacgtcgccgcagtactggtagaggcggcgatggttgaaccagtcgacccagcgcgcggtggccaactcgacatcctcgatggaccgccagggcttgccgggtttgatcagctcggtcttgtataggccgttgatcgtctcggctagtgcattgtcataggagcttccgaccgctccgaccgacggttggatgcctgcctcggcgagccgctcgctgaaccggatcgatgtgtactgagatcccctatccgtatggtggataacgtctttcaggtcgagtacgccttcttgttggcgggtccagatggcttgctcgatcgcgtcgaggaccatggaggtggccatcgtggaagcgacccgccagcccaggatcctgcgagcgtaggcgtcggtgacaaaggccacgtaggcgaaccctgcccaggtcgacacataggtgaggtctgctacccacagccggttaggtgctggtggtccgaagcggcgctggacgagatcggcgggacgggctgtggccggatcagcgatcgtggtcctgcgggctttgccgcgggtggtcccggacaggccgagtttggtcatcagccgttcgacggtgcatctggccacctcgatgccctcacggttcagggttagccacactttgcgggcaccgtaaacaccgtagttggcggcgtggacgcggctgatgtgctccttgagttcgccatcgcgcagctcgcggcggctgggctcccggttgatgtggtcgtagtaggtcgatggggcgatcggcacacccagctcggtcagctgtgtgcagatcgactcgacaccccaccgcaaaccatcggggccctcgcggtggccctgatgatcggcgatgaaccgggtaattagcgtgctggccggtcgagctcggccgcgaagaaagccgacgcggtctttaaaatcgcgttcgcccttcgcaattcggcgttgtcccgccgcaagcgcttcagctcagcggattcttcggtcgtggtcccgggccgtgcgccggcatcgacctgcgcctggcgcacccacttacgcaccgtctccgcgcagccaacaccaagtagacgggcgacctcactgatcgctgcccactccgaatcgtgctgaccgcggatctctgcgaccatccgcaccgcccgctcacgcagctccggcgggtacctcctcgatgaaccacctgacatgaccccatcctttccaagaactggagtctccggacatgccggggcggttcacagtggcgtttcgaacatttgctcattcctttcctagttgcgttggcacagttgcgttggcaccgggtgattccgcgaactgcccacgcatatgccgagtgctattcacctcggccacaccgacatttgccgggatgagaccgtcgccgcgcgcaatcctgtgaatgaagcggtaactgtggattaaccaattaa

SEQ ID NO: 2052 - DNA, 401 bp, Mycobacterium tuberculosis H37Rv
tccagtcgcccgagttcgccgctcgcttggctgccgctcaacacaggtagcgcctaccagcctcgagggtttccatggcgtgccccagtccgaagctgctgctgcttgactccgcgcgctgggcccgagcgcgcgctgttgtacggcccaaacggcgtgtcggtgtacagtcgcgcgctcgcggcttcagtccggccccccgactccggcaggcccgacggcgcccagcgctagccgggcgcgccggccatgccttcggtgccggaaacgccaggggacccggggccgttggtgaggccccccgcgcctgcctcaccgccgctaccgcccgcgccaccggcaccgcctgcgccgcccgcgccaccgataccgtcagcgccgctgactcctgcggcaccgct

SEQ ID NO: 2053 - DNA, 401 bp, Mycobacterium tuberculosis H37Rv
ccgccgttgccgaacaacaacccgccggcgccgccgttgccgcccgcgccgccggtcccgccggcgccgccgacgccaaggccgctgccgcccttgccgccatcaccacccttgccgccgaccacatcgggttctgcctcggggtctgggctgtcaaacctcgcgatgccagcgttgccgccgcttcccccgggcccccccgtggcgccgtcaccaccgataccacccgcgccaccggcgccaccgttgccgccatcaccgaatagcaacccgccggcgccaccattgccgccagctccccctgcgccaccgtcggcgccggaggcggcactggcagccccgttaccaccgaaaccgccgctaccaccggtagaggtggcagtggcgatgtgtacgaaagc

SEQ ID NO: 2054 - DNA, 400 bp, Mycobacterium tuberculosis H37Rv
ccccgatgcctgcggccacgctggtgccgccgacaccgccgttgccgccgttgccccacaaccaccccccgttcccaccggcaccgccggccgcgccggtaccaccggccccgccgttgccgccgttgccgatcaacccggccgcgcctccgctgccgccggtttgaccgaacccgccagccgcgccgttgccaccgttgccaaacagcaacccgccggccgcgccaggctgcccgggtgccgtcccgtcggcgccgtttccgatcaacgggcgccccaaaagcgcctcggtgggcgcattcaccgcacccagcagactccgctcaacagcggcctcagtgctggcataccgacccgcggccgcagtcaacgcctgcacaaactgctcgtgaaacgctgc

SEQ ID NO: 2055 - DNA, 403 bp, Mycobacterium tuberculosis H37Rv
gctctccgtcaaaatccgcgagataggtaaagccgtcaccgcccaagccaccattaccagcgtccccgcccgacccgccgtcaccgccgtccccgccaacgcctcgattgccgacctcgccggcgggtgccgacccgccggccccgccgtttccgccggcgccgccccacccgccgtagccaccgtcgccgccgtcgccgccgtcgcggcccgtcgtttcgttaatgtcaaagccgtcaacgccgttaccgccgaccccaccagccccgcctaggcctccggccccgccgtcaccaccgtcgccggtctgagttccgccggcgccaccggccccgccgtcgcctcccgccccaccgctgccgccgtcgaagccgtcgaagccctttaggtcggagtcgggcga

SEQ ID NO: 2056 - DNA, 409 bp, Mycobacterium tuberculosis H37Rv
ccaccgaccccgccggcaccgccatcgccgccaccaccgccggccccaccggtgccgccgatactgtcgataccgttggcgcccctggccccggccccaccgctagcgcccacaccgccgttgccgccggccccgccgttgccgccggcaccgccgtcacccgacaccgacccaccggcgccaccggcaccaccggcaccaccggcaccgccggcctgccccgcgtcgccctgacccccgttgcctcccggttggccgagggcgagggcatctgaaccaggcgcgcccgaattggccccgttggcgccggccgcgccatcgccaccattgccgccggcgccaccatcgccgacccggccggcattgccgccgtcgcctccgttgcccccggcgccgcccgcgacgctgg

SEQ ID NO: 2057 - DNA, 400 bp, Mycobacterium tuberculosis H37Rv
ccgccatgaccgccggccccaccgtcaccgaccaacccgccgttgccaccggcaccgccgttaccgccatgaccgccggcgaccggtgcgtgggcgccattgccacctttgccgccgttgccgccgctgaccggcccgtcgttgccggccgccagaccattggcccccgcgcgagcaccggcgccgcccgacgcccccccggctccgccagccccacccaggcccgggtcgccaccgtgaccgccggccccgccgtcaccggcggccagccaactgccaccgttgccgccggcaccgccgtcaccaggcgctccacccagccccccacccccgccagccccgccgtctccggcccggccgacataccccaatagtccagccgacccgccagcacccccgg

SEQ ID NO: 2058 - DNA, 400 bp, Mycobacterium tuberculosis H37Rv
caaattcgccacacttaacatcaccggcgattgttttctgttgcagaaggtgctcgacctgccggccggacaactccccccggaaccacccatctggccaacgacctcgacgccacattgatcgcaccacaaccgattccccgaacgctcccacggtggcagcgcatcgtcgcgctgaccatgatcggcatatcaaccgccctgataggtggctgcacaatgggccaaaaccccgacaaatcaccgcacctgaccggcgagcagaagatccagctcatcgacagcatgcgccacaaaggctcctacgaggccgcccgggaacgcctcaccgccaccgcccagatcatcgccgaccgcgtcagtgcggccatcccgggccaaacctggaaattcaacgacg

SEQ ID NO: 2059 - DNA, 401 bp, Mycobacterium tuberculosis H37Rv
ggcggcgaacttgcccggcatggtcaccgaaacaccgacccactccggtccgaaaccaccgaccacgacgggcaactcggccgcaccgcattcgatgcgctcataggtccagtcgtgcagccccaacgcccggtaggcggccaggtgcagctgcggggagcgggaatgcgcgatcggcgaaccaagcacgccggcttttttgggaccttcgctcatcgcgcgctgtcgaggacaccgttgtgtttggccagctcgatgttcgccagatgctgctgatagtccctggtgaacagcgtcgtgccctgggaatcgatggtgacgaagtacagccagtcgccaggtactggatgctcggcggcgcgcagcgcgtcgacgccgggcgaacagatcgcggtggccgg

SEQ ID NO: 2060 - DNA, 401 bp, Mycobacterium tuberculosis H37Rv
aacatcatgggcattcaacgcgccgttctcctcattgccgacatcggcggatacacaaattacatgcactggaaccgcaagcacctggcccacgcgcagtggacggtggcacagttgctggagtccgtcatcgacgctgccaagggcatgaagttggcgaagctggagggcgacgccgcgtttttttgggcaccaggggggcaacaccagtgtcctggtatgcgaccggcccccgcagatgcgccagaggttccgcacgcggcgcgagcagatcaaaaaagaccatccctgcgactgtaagagttgcgagcagcgggacaacctgtcgatcaaattcgtcgcccatgagggcgaagtggccgaacaaaaggtgaagcgcaacgtcgaactcgctggcgttg

SEQ ID NO: 2061 - DNA, 402 bp, Mycobacterium tuberculosis H37Rv
cgcggcctaccgggtgctcgccgggatcgccgacggcttggggctgccgatctcgcaggtgcggcccgcctacgaagacccgttgagccggctggctgcggccgtgcgaatgccagccggcgacccggtggaatccggtgacgacctcggctgcgacaccaaccccgacacccccaccggccgcgccgcgctgctggcgcgcctcgatgaggccatcacctctccggctgcgtacgtgctgccgctgcaccgccgcgacgacgggcaaggctgggccagcgcgaactggcggctgcgccgcggtcgcatcgtgttgctcgaaggggattcgccggcgggcctgcggctgccgctggattcgatcagctggcgcccaccccgggcatcgtttgacgccgaccc

SEQ ID NO: 2062 - DNA, 401 bp, Mycobacterium tuberculosis H37Rv
atggttgaacacgtcatgggtgagataccacgcgaggccggcgacgaccgatgtctgggtgatcggccacagcacggtgcgcaaccgttgggcgaccgcacggccgccgcaggccgtcctgactagcagcgaagcgctcatgaacgcctatttattcacactcgggtgcgacgtcgtaaccgcaaagatctggtcatgcctgctggacccgcttgggctgggcatctattccggactccttacgttgctgagcggtaatgggcgccggcgcgtcggtgagcggatcgacgccgccgccggtcttcgggaacgcgatcacctcacggatcgagtccatcccggccagcagcgcggtggtccggtcccacccgaacgcgattccgccgtgcggcggtgcgcca

SEQ ID NO: 2063 - DNA, 400 bp, Mycobacterium tuberculosis H37Rv
tggcggtgacggcggtgacggtggcggcctgtttagtatcggcgtcggtggggacggcggcaacgccggcaacggcgccatgcctgccaatggcggcaacggcggcaacgccggggtcattgccaacggctcctttgccccgtcgttcgtcggcttcggcggcaacggcggcaacggcgtcaatggcggcaccggcggcagcggcgggatcctttttggcgccaacggcgcgaacggaccgtcgtagcgggtcctccagcgcactactcgaacaaccccggttgactcgctccgaccggtggcgtcatgcccaggtgcgtccaggccagggcggtggccacccggccgcgcggggtgcgcgcgaccatacccgcgcgcaccagaaatggttcgcacacct

SEQ ID NO: 2064 - DNA, 400 bp, Mycobacterium tuberculosis H37Rv
ccgccgacgggccgctaccgtagcaactcgcaaatccaggtctggatttccggcgccggccggctccgttagccgtcggctccgttggtgccggccaggccgggtggccccaacagtgatgcaccgccgctgccgccgggcccgccgaagcctggagcgccattgaagaggctcccggcgccgccgtttccgccgtttccaccgttgccgatcagtccgacgctgccgccgttcccgcctttcccgccgtcaccgccggacccgccagcagtgccggcgctcgctccgttcccgccggccccggcgctcccaccggcccccgcgttgccgatgagggcattgccgccgtttccaccgctgccgccgctaccgccattccctccgaaggccgtaacagacc

SEQ ID NO: 2065 - DNA, 403 bp, Mycobacterium tuberculosis H37Rv
gcgtcactcctgccgcccggaacttcagcggagcttccagaaacgagatcgccaccaccattcccagccagacgaacgcgacggcgacctcgatcgccggtccggcgctcaccgaatggctccttccagcggcgtgaagtgggccaggcacaggtcgggttcgacgaacgcgtcgagccggtcgacggtgactggcgccccccatgtttgcaaggctccccgcatgatccctaagtggacggggcagacgacaccggcttgagtttcggcgagttccagaaacggacagtgccgcagaccgacctgttgcctgccgttggatgcccggcgctcgggagcgaagccaaggtcgtcaagcaccgcgaccaagtggtcgatcgtctcctcggtgtcggcaccggcc

SEQ ID NO: 2066 - DNA, 401 bp, Mycobacterium tuberculosis H37Rv
aacgaacttcggttctcgcagggtcgccacggctggcgatgtgcggtaacgctcgatgtgtgaattgagacctgattcatgaaaatcgtcgaggagaccccataccggttccggatcgaacaagagggcgcgatgcgggtgcccgggatcgtgttcgcgtccaggtcgttgctgcctcgtgacgaaggcgacatggcccttgatgcaagtggtcaacgtggctacgctgccggggattgtccgggcctcgtatgcgatgcccgatgtgcactggggatatggtttcccaatcggcggcgtggccgcaaccgacgtcgacaatgatggagtcgtttccccaggcggtgtcggcttcgatatttcgtgcggcgtaagactcttggtcggcgaagggctggacc

SEQ ID NO: 2067 - DNA, 400 bp, Mycobacterium tuberculosis H37Rv
tgatgatccacaccggctcacggggcctgggccatcagatctgcacggatcacgtccgccagatggaacaagccatgggccgatacggaatcgcggtgcccgatcgccaattggcttgtgtgccggtgcactcccccgatgggcaggcctatctcgccgcgatggcggcggcggccaactacggacgcgccaaccgccaatgctgaccgaggcgacgcgtcgtgtgttcgctgatgcaaccggaacacctctggacctgctctacgacgtgtcgcacaacctggccaagatcgagacgcatccgatcgacggtcagctgcgctcggtgtgcgtgcaccgcaagggcgccacccgctcgctgccgccgcaccatcacgagctgccggccgaactggcagcg

SEQ ID NO: 2068 - DNA, 401 bp, Mycobacterium tuberculosis H37Rv
tgagttgcgggccgcagtgaatgctgcccgcgccgccggcgacacctgggcagccatcggcgtcgccctcggcatcacccgccaggccgcgttccaacggttcgggccacacagcacagcgagcccctaaaccggcgcgcctccgcggtggagttgacgacgaccagacagggccgaagcggagtcacagcgtctggccgacacacgtggcgtcgtgtttgctaggcatgggttttgtgtttgctgtcccccacaaccccagacccgtacaaatccccagacccctacacacagcgacacggcgacccgccgtctcctgagtgtgtttgctaaaatttcgtttgttctggtcgatcacttattgtgtttgccggttttggcgatgggcttgattcctctga

SEQ ID NO: 2069 - DNA, 400 bp, Mycobacterium tuberculosis H37Rv
ctatttccgctatctggacgccaaggcggacaaccggctggacggcggtatcgatccagcctggctgacgcccgagcgggagggccagcggtgatcgcaagcgcggcgagccgggcgcagcgggtcaccgccatcgggactagcggtgatcgcaagcgcggcgagccgggcgcagcgggtcaccgccatcgggactagcgtggacccatgacgcgcccaaagctagaactgtccgacgacgagtggcgtcagaagctcaccccgcaggaattccatgtgctacgtcgcgccgggaccgagcggcccttcaccggtgaatacaccgacaccacaacagcgggcatctaccagtgccgggcctgtggcgccgaattgttccgcagcaccgagaaattcgagt

SEQ ID NO: 2070 - DNA, 400 bp, Mycobacterium tuberculosis H37Rv
cacgtgtcggcggataggtctaccgtcgaaatctgtgacctccgccggcgacgatgcagagcgcagcgatgaggaggagcggcgcttgacctccgccggcgacgatgcagagcgcagcgatgaggaggagcggcgcttgacctccgccggcgacgatgcagagcgcagcgatgaggaggagcggcgcttgacctccgccgagccggccctattccgcgaggcagttgcggcgatgaacgctgtcaccgtgcggccggaaatcgaactcggccctatccgaccgccgcagcggctagctccgtacagctatgcgctgggagccgagatcaagcatcccgaactcgacgtcattccggagcgttccgagggcgacgccttcggccggctgatcatgctgtat

SEQ ID NO: 2071 - DNA, 401 bp, Mycobacterium tuberculosis H37Rv
ctgcccgggcttatcgctactctgcgcggcgggccagcaaagatgcgaagtgtgggcgaaaccgcaaatgcatcgcctcggccgctatacgatccccatgcacagtcttgagggtgagctggcgattttgggccgacacgacgggctgtggcgtgtttggaggtctcagatgtcatttgtgatcgcggcaccggagtttttaacggcggcagcaatggacttggcgagcatcggctcgacagtgagcgcggccagtgccgccgcatcagcccccacggtcgcgatcctggccgcgggcgccgatgaggtgtcgatagccgtcgcggcgctgttcggaatgcatggccaggcatatcaggccctcagcgtgcaggcatcggcgtttcatcagcaatttgtgc

SEQ ID NO: 2072 - DNA, 474 bp, Mycobacterium tuberculosis H37Rv
gcgggttcaccacctttcttgatgccgctgggggtgccggcggggccggcggcgccggtgggctgttcggcgcgggcggggccggcggcgtaggcggcgccgccctcggcggcggcgcccaggccgccggtggcaacggcggtgcgggcggggtcggtgggctgttcggcgccggcggtgccggcggcgccggcggcttcagcgacaccggtgggaccggcggggctggcggggccggcgggctgttcggcccgggcggcggctcgggcggcgtcggtggcttcggcgacaccggtgggaccggcggcgacggcggcagcggcgggctgtttggcgtcggcggggccggcgggcacggtggcttcggcagtgctgccggcggcgacggcggcgcgggcggcgccggcggcacggtcttcggctcgggcggggccggcggtgcaggcggagtcgccactgtcgctggccacggtg

SEQ ID NO: 2073 - DNA, 400 bp, Mycobacterium tuberculosis H37Rv
ctcaaccccgtcctcgatcgcgcagatggcattgcgcccaccgaaaccggtcagcacatggtccaaccagcaccaaaagcccggtacgccgcgccgaatcgcgggctgaccaactcgtggaactccgtccgccgtatgccgccaaccgcgtgcgtcagcgccttgtggcacacccgcaccggatcggctacctaacccgcgccggccgctgccttggcgcggcacccggtcggccatccaccgcagatccccgccaccgaacgcaccgaaacgccgaccttcggcccgcttcgtatccggttctgggcctgcggcattttcgaggtacaacgggcacgctatggcattaccacttcggcgtccaaggcgctggtgcgcggtctgaccgcgtcggcgttct

SEQ ID NO: 2074 - DNA, 424 bp, Mycobacterium tuberculosis H37Rv
gcccatcagggtctggcatcccgcgatcatagcccgctgggcgggccgctctagatgggcgccgccccgcgcagatgctcgaagatcagggacgtctgggtacctgcgacgtcggcgtcggcattgaggttttcgaccacgaacgaacgcaggtcctcggtgtcgcgagcggcgacgtgcaagatgaaatcgtcggcgccggccagaaagtagacatccatcacctgccgtttgcggcggatctgctggatgaagctgcggattttcccgcgagcggacgactgcaagttgaccgagatcatcgcctgcaacggcaaacccaccgcgaccgggtcgatgtcggtgtagaacccccggatcacgccgaggtccaccaaccgccgaacccggccgtgacacgtcgacggcgctatcccgacagtgt

SEQ ID NO: 2075 - DNA, 401 bp, Mycobacterium tuberculosis H37Rv
cgtcgcggaactaacccgtcgtggccatgaggtgctcatccaggcaggtgccggagagggctcggctatcaccgacgcggatttcaaggcggcaggcgcgcaactggtcggcaccgccgaccaggtgtgggccgacgctgatttattgctcaaggtcaaagaaccgatagcggcggaatacggccgcctgcgacacgggcagatcttgttcacgttcttgcatttggccgcgtcacgtgcttgcaccgatgcgttgttggattccggcaccacgtcaattgcctacgagaccgtccagaccgccgacggcgcactacccctgcttgccccgatgagcgaagtcgccggtcgactcgccgcccaggttggcgcttaccacctgatgcgaacccaagggggcc

SEQ ID NO: 2076 - DNA, 400 bp, Mycobacterium tuberculosis H37Rv
tatgcgtcagcgggaactaccgcagaattcaccgcatcaaaggtggcccgggttagaacaagttctcgtttgactgtgacgacgcggagccgacttgtacactcccggcaagggaccgccgagggcagggggtgtcgtgttcaccagggtgcggctgatcggagggctcggtgcgctgacggcagcggtggtggtggtgggcacggtgggctggcagggcatccccccagcgccgaccggcggcgacgcggtccagctgcgatcgaccgcggcgcccatgtccaccacgatgaagagcccgatcgtggcgaccaccgaccccagcccgtttgacccgtgccgagacatcccgttcgacgtcatccagcggctcggattggcctacacgccaccggaagcc

SEQ ID NO: 2077 - DNA, 402 bp, Mycobacterium tuberculosis H37Rv
ccctgcaacgcaacttccaccggctcgggctcaccggcgccaccaccgggtcggcgccggcggtgttcggccggttcgaagccgagcacccgaacgccctgtggaccggggatgtgttgcacggcatacggattgatctccgcaagacctatctgttcgcgttcttagacgaccattcccggttggtgcccggctaccggtggggccatgccgaggacacggtgcggctggccgccgcactgcgcccggcgctggcctcccgcggcgtgcccaacgcggtgtatgtcgataacggctcgccctatgtggatgcgtggttgttgcgggcatgcgcgaaactcggtgtgcgccttgttcattccacgccaggtcggccgcaaggcaggggcaagatagagaggt

SEQ ID NO: 2078 - DNA, 982 bp, Mycobacterium tuberculosis H37Rv
agtcacggcagactgaacaccacaccgacaccccgaacaccaccgaccccgccggacatctcccggcggggtcatttcatgaccaaacgtcctcaccgtcaacgccgccatcatgctcatcctgaatgccggtcaacagacgcggtggcgacccagtcgtcgtagtttccgtcccctctcggggttttgggtctgacgactcgggcacggccgaaacaccgcgcgaagggcggttcaagtttccgtcccctctcgtggttttgggtctgacgactgggaggatgtcactcggacatagctgtcatcggcggtgtgtttccgtcccctctcggggttttgggtctgaggacatggagcagtagcgtggctgtggtgtggcgggcgatatgcgtttccgtcccctctcggggttttgggtctgacgactgctgcacctcccgcacccggtgcgattctgcgtccagtttccgtcccctctcggggttttgggtccgacgaccccgatagtcgcgctcgtccatgtcccaccatgagggtttccgtcccctctcggggttttgggtctgacgactacctgatagaagccggaaagctccgtgccgtcaggtttccgtcccctctcggggttttgggtctgacgacagggcactggacctgtatgaggcacagatggcgtactagtttccgtcccctctcggggttttgggtctgacgacccggatcggttacccacgccgatttactggccatcgtcgggtttccgtcccctctcggggttttgggtctgacgacacttgcgcgcacaacgcatccgccatccacggggcgtttccgtcccctctcggggttttgggtctgacgacctgaaagggggactgtggacgagttcgcgctcaaaatgtttccgtcccctctcggggttttgggtctgacgacttgaacacgccgatacctatttggtcgggagtgataaagtttccgt

SEQ ID NO: 2079 - DNA, 400 bp, Mycobacterium tuberculosis H37Rv
gatttactggccatcgtcgggtttccgtcccctctcggggttttgggtctgacgacacttgcgcgcacaacgcatccgccatccacggggcgtttccgtcccctctcggggttttgggtctgacgacctgaaagggggactgtggacgagttcgcgctcaaaatgtttccgtcccctctcggggttttgggtctgacgacttgaacacgccgatacctatttggtcgggagtgataaagtttccgtcccctctcggggttttgggtctgacgaccggacttgatcgacgcgaacctgtctgacgcgaacctgtttccgtcccctctcggggttttgggtctgacgacggctggaaaagggcgcggggcaaccgcatcgtcaagagtttccgtcccctctc

SEQ ID NO: 2080 - DNA, 400 bp, Mycobacterium tuberculosis H37Rv
tccgccatccacggggcgtttccgtcccctctcggggttttgggtctgacgacctgaaagggggactgtggacgagttcgcgctcaaaatgtttccgtcccctctcggggttttgggtctgacgacttgaacacgccgatacctatttggtcgggagtgataaagtttccgtcccctctcggggttttgggtctgacgaccggacttgatcgacgcgaacctgtctgacgcgaacctgtttccgtcccctctcggggttttgggtctgacgacggctggaaaagggcgcggggcaaccgcatcgtcaagagtttccgtcccctctcggggttttgggtctgacgacgcgttgtggtcgtgtcgtggagcctgtatttcgctggtttccgtcccctctcgg

SEQ ID NO: 2081 - DNA, 400 bp, Mycobacterium tuberculosis H37Rv
caggcggtgaggttgggtttccgtcccctctcggggttttgggtctgacgacacggacgagctggaccgcatcagcgatgctgagctgagggtttccgtcccctctcggggttttgggtctgacgacttgtctcaatcgtgccgtctgcggtgacacgctccaagtttccgtcccctctcggggttttgggtctgacgaccaccaggatcagcgccaagccagttagcgcaatccagtttccgtcccctctcggggttttgggtctgacgacctcccggaccatctgcagctcgcccgggtccatgcggtttccgtcccctctcggggttttgggtctgacgaccggagtcatccgcgcgggccggcgcgattgttgccgggtttccgtcccctctcggg

SEQ ID NO: 2082 - DNA, 462 bp, Mycobacterium tuberculosis H37Rv
gccaagccagttagcgcaatccagtttccgtcccctctcggggttttgggtctgacgacctcccggaccatctgcagctcgcccgggtccatgcggtttccgtcccctctcggggttttgggtctgacgaccggagtcatccgcgcgggccggcgcgattgttgccgggtttccgtcccctctcggggttttgggtctgacgactggcgatttacgacgctgacgggaactcgtgcgaatgtttccgtcccctctcggggttttgggtctgatccgcgaaattcactgcgcgttattcaaggtttccgtcccctctcggggttttgggtctgacgacccgagccgaccatccgcatcacaccgaaagggttggcgcaagtttccgtcccctctcggggttttgggtctgacgacacgtggggagagggaatggcaatgatggtcgacgaagtttccgtcccc

SEQ ID NO: 2083 - DNA, 400 bp, Mycobacterium tuberculosis H37Rv
gtcgaattcgatccggcgtggcgacggtatattgatcggcttgcggtcgtcgagcatctccggggcaaatgccagattcgctgtgccggagccgaatcggttgaacatcgaatacaggggcgtgtccggatcccaagtgctcgcaccatggccgtcgtcggagtcggccttgcggcggtcggttccggccgcgatattgtaggcgatgtaggccggcgcatcggcggcaaggcggccattctcggccgccgtacgcagcgcagaactgtggtgatagctgatcgcgtcgagaatgcggcggtcggagaccccaatgtcagcctcatccacctcgtcggtgaactgcgacggattgcggctgtcgcgcaaccacaccttcttcataaaagcgcggccaatc

SEQ ID NO: 2084 - DNA, 401 bp, Mycobacterium tuberculosis H37Rv
tccggcgcaacaggtcttgaatcagaccgaaatgcgggtcgaagacgaactgggcggccaggccgacagcggcaccggagatcacgaacggcgcgaaaacagtggagcgcaccaggtttcgtccacgcaacggtcgatcgagcagcatcgccagcgccaaccccagcaccatcgagccgaccaccgcggcaccggtgaaaaccgccgtgttgaacacgatctggcgggtgtccgaccgggtgaaccactcggtgtagttggataaccccacaaatcgggccgacggatcggagacgttccagtcgaagaacgacagccggatgttgtcggccaacgggcgatagacgaacagcagcaatagcgccacattggggccgaccaacacgacgaacagcgcataa

SEQ ID NO: 2085 - DNA, 440 bp, Mycobacterium tuberculosis H37Rv
cagccgtaacccgaccagataggggttctcggtcacccgccaagcctagtggcgatcgcaagcgcggggaccgggcgccgcgggtcgccaccatcagggccagtggcgatcgcaagcgcggggaccgggcgccgcgggtcgccaccatcagggccagtggcgatcgcaagcgcggggaccgggcgccgcgggtcgccaccatcagggccagtggcgatcgcaagcgcggggaccgggcgccgcgggtcgccacccctttggccgcgaatgtaacgccactgcgaatttccggcccggcttttcgcagtgccgttacgctcgtggagtattgcaggccgcatgtgcgacgaaacgcgccaccgcaccgggtgttgcggccggatgggtatgcaggtaggacgcgtgcacgccgctgtgcaccgcgccgtctcgcacgtcgt

SEQ ID NO: 2086 - DNA, 401 bp, Mycobacterium tuberculosis H37Rv
gcaacccgtcgtcgggggcgtgcagcgacagcgccagggtcacgccgagccgcgcgtcggcaaggttgcggatagcaggggccagacccaccgtcgacaccgtcaccgcgcgggccgaaatcccgaaaccggacggcggccgcgcggtaatgcgctgaactgcggccaacaccctggcgtagttggccagcggctccccccatacccatgaacaccacattcgacaaccgatcgccgaagtcgtcgcgcaacgccgcggcgccggcacgcacctgctcgaggatctccgccgtcgataggttgcgagtcaatccgccctggccagtggcacagaacgggcaagccatgccgcagccggcctgcgaggaaatgcagaccgtgttgcgccgcggatagcgcat

SEQ ID NO: 2087 - DNA, 400 bp, Mycobacterium tuberculosis H37Rv
cgagcacgaatcgatgatcgacaccgttcgcggtgtgggttatatggcggtgacgccaccgcagccgcgctggatcatcagcgaatcgatactaaaccgttgcaagtgagtgatctttagtggtcacttgacttgcaccccgtctcggggttgttcgccggccgggtggccggttgccttccgcgcttcacggccacccgccgggccaggcccggtcttacggtcggctccacgcttgacggcggccccaactgggccgacgacgctaggtggttcctcgtagcgtgcgaggttgatcgcggcgttgtcgtcacgttggtgcgtgatcgaacagccgtcgcattgccatttttcgtcccagccgatgtcttgcacatgccggcaggcatggcaggttttc

SEQ ID NO: 2088 - DNA, 440 bp, Mycobacterium tuberculosis H37Rv
gcggcgcacagcgcgggggtggtgcacccgaacctcggtgatggtccggccggtcacgtgagcctgcaagccgcgccgcaccacctcgacttcgggcagctcgggcatccagtgatgatcgcaagcgcggcgaagccgggcgcagcgggtcatcaccatcgaaccagtgatgatcgcaagcgcggcgaagccgggcgcagcgggtcatcaccatcgaaccagtgatgatcgcaagcgcggcgaagccgggcgcagtcccccgcaagcgggaggtgcccccaggtcatcaccatcgaaccagtgatgatcgcaagcgcggcgaagccgggcgcagtcccccgcaagcgggaggtgcccccaggtcatcaccatcgaaccagtgatgatcgcaagcgcggcgaagccgggcgcagtcccccgcaagcgcggcaaagccggcg

SEQ ID NO: 2089 - DNA, 400 bp, Mycobacterium tuberculosis H37Rv
catcctgatagccacaacgccaggcaggcacctagcaccaccagaacagcggacgtcaccgcccgttttccatcattcatttgcgctcactacctcgattgtcaaatgggcccgcaggccgaatgcaggttgattggatcacgctgggcatgactgcccgcctcctcactcgcgccattccggcgctcgccgtcgccgggccccgccaaattgcccgcctcctcactcgcgccattccggcgctcgccgtcgccgggctaggcatggaccgatacttccgcggcggcgggttcgacaacctgcgacgtcggatcaccggattccgttgggcggctgccagacatttgctgggcgacatactcggcgaccgcagtgggagtgggatgatcgaaaatcacgg

SEQ ID NO: 2090 - DNA, 400 bp, Mycobacterium tuberculosis H37Rv
aatcagttgctcacggcttgcgccgaccaccaccgctcggtgctcaaacaccgagcgactggccaacgagcaccccacatcgatcggatccagccctgggttggcctgcacgtgggccataagtcgacccgcctgcgccgtcaacgcctcagccgatctcgccgaaatcacccacggcaccatcgacggccgcggcccccggtgctttcgctcgcctcaaccggcgcctctgcgggggctggtacgggggcctcttccaagatcagatgcgcgttggtgccgctgatcccaaaggaggacaccgccgcccggcgcggacgcccgtcaaccgaccactccctggcctcggtcaacaccgacaccgcgccgctggtccaatccacccgcggggaaggctcat

SEQ ID NO: 2091 - DNA, 400 bp, Mycobacterium tuberculosis H37Rv
gttgctggggagcccgatcaccggcaccccggccgccaacgcctgctgcgtcgtcgggctgccgccgttgcagagcaccacggcggagcgcgctgcagccgcttcgcccggcaggtagtccgcgacgaaggcgttggccggcacgttcttcaggtggttccggccagcggtggccgcgatcaccgtgacgggtaaatcggccagggcgttcaaaaccacctgcaacaggttctttccgccggaactgccgagggtcgcataaataatcggccggtctgtcggcagcgagtgccaccaagtcggcggttttacgtcgggcgaccacaggacgggtccgagatatcgatggttggccggcaggttgtatgtcggcaccagctcgggtacgtcggcatacagg

SEQ ID NO: 2092 - DNA, 402 bp, Mycobacterium tuberculosis H37Rv
agttcccggcacctccacgccacccatcgacgcgacgaccaactcgacgccgcgccacaacgcggccccgagggcgttggcgtcgaccgcccgcaataccgcgccagaggcggcggccgcagtcgcggtcacctctgcgatcccgcgcaggatctgggacaggatcacgccggagttgccgcgagctccgttcaacgcgcgccggccgcgagagcggccgcaacccgcgccacgtcttcggcgtcagcctgcgaattcgcgtgcaaatcagcttctacgaccgcggcacgcatggtgaacagcatgttgacgccggtatcggagtcagcgaccgggaacacattgagccggttgatctcgtcgatgtggaggatcagatcgctgacgacggcgtgtgcccag

SEQ ID NO: 2093 - DNA, 508 bp, Mycobacterium tuberculosis H37Rv
tcagacgttatcgaccacaccatccccgcggtacccatcgacccggcgccggctcgctagtgccgatcgcaagcgcggcgcttgcgccgggcgcggcgggtcggcaccatcgggctaagtgccgatcgcaagcgcggcgcttgcgccgggcgcggcgggtcggcaccatcgggctaagtgccgatcgcaagcgcggcgcttgcgccgggcgcggcgggtcggcaccatcgggctaagtgccgatcgcaagcgcggcgctagcgccgggcgcggcgggtcggcaccatcgggctaagtgccgatcgcaagcgcggcgctagcgccgggcgcggcgggtcggcaccatcgggctagtgcaggcccacgccgcgggccaatgtcgtctcgatcatcgtcgccagcagggtcggatagtcgacaccgctggccgcccacatccgcgggtacatcgagatcgtggtgaatcccggcatcgtgttgatctcgttgatcaccggaccgtcgtcgg

SEQ ID NO: 2094 - DNA, 409 bp, Mycobacterium tuberculosis H37Rv
ggaagctcccggttggtgatcgtcagggcgtcggggttggcgtcggtgagcacccacgaacctgccggggtgatacccaccgcgatcacgtcgaaccgccgcgagtccaggttgcgcaggatgctgccggcggacacacacgagatggcgtgctcgttgctgcgcccgccgaacacgacggcaacgcggacacgccgatcacgccggtcgttagcactcacaacctgcagaggctaccgggtcaggcagacgggctcccacgagctgcagttttcggtcgtgccggcccgtgcgaggctcattcgggcttggtgcggcgacccagcagcagcgttatcgcctcgtccaccgacagccctttatgacagacccgatgcaccgcgtcggtgagtggcatttcgacgtcgta

SEQ ID NO: 2095 - DNA, 400 bp, Mycobacterium tuberculosis H37Rv
gccgtcgatgctggcaaaagcgacaccgtccgggctggcgattcgaccgatacgcatttggatgagcttagccgggccctgccgggcgacgattcgggccggcacggcccgatgaggagcccggcaatcagaccctgccgggcgacgattcgggccggcacggcccgatgaggagcccggcaatcagaccctgccgggcgctgcgggccctcaccatcgggccccgtgccgggtgactgtgccagcatgggtggatgtcgcgagatccgactggggtgggtgcgcgctgggcgatcatgatcgtctcgctgggggtgaccgcaagctcgtttctcttcatcaacggtgtcgcgttcttgatcccccggctggaaaatgcgcgcggaaccccgctatctca

SEQ ID NO: 2096 - DNA, 401 bp, Mycobacterium tuberculosis H37Rv
cgaagcttgcgatcatcgactattcggaggcgcgccaggcggcagcggcgacaaccggaacgtcggcacggtgctcaatcacgggtgcacggtgtgcatcagaatggcgggggttcgttgtcgcggtgaggcgttcggcgaggaggtagtgtctaccccttgcccgcgggttcgtgcggactgaagggatttcattgggaacccacggctgcgtatcgcagggcctcggtgacgtctgcttcctcaagctcaggaagttcggcgagaatctcggtggatgtcatttggtccgcgaccatcgcgaccacagtcgccactgggatgcgcaagccccggatgcatggcatgcctcccatcacgtcggggtcgatggtgacgcgggtgactcgcatgtctataag

SEQ ID NO: 2097 - DNA, 400 bp, Mycobacterium tuberculosis H37Rv
acccacatccgcacatagtcggcctcgttgagcgcgatcgggatcgtgttgatcccaaagaaattcgtcgccaccaacaccgcatgcgtgaggtggttggccgccaactccggcaacgtcggcatctccgccaacgcacaaacatagccagccgccgcggcctcatgctcaccggccgccgccgcgctatccgcactggctgcaccaaccacgccacatacggcacataggcggccacaaacaactcagcactgggaccctgccacaccccggcccccaccgcggccaccaccacgctcaactcttgcgccacagcggcgtactcggcgcttaacgcgctccaccccgccgcggccgcctgcaacgaacccggccccggaccagcacttagcagcgccga

SEQ ID NO: 2098 - DNA, 414 bp, Mycobacterium tuberculosis H37Rv
gatctggcaacgactcaagtagtgcatcttcgatatgttgagcggcccgacaaggctccagattcccgtcatagcgcgaccacgtccgtcgacctggcgatgccgatgccgggaagttcatcgcgccccgtggatctggtgagacctggtgaacctgggatctgccggtactcgaaaacactacacctagggggtggcacctagggggtggcacggagaagagatacaagatgttctgaataacattttcgaaattccctggtcgtaagcctggctcgagcaccgcggcggcgtgtcgcagatcacctcagccgccgccatacccgtctgacccaatatatcaccggccaccgacaacgtcgccgctagcttcccgccgaaccgctaccagcaaagccgatggagccgctattg

SEQ ID NO: 2099 - DNA, 400 bp, Mycobacterium tuberculosis H37Rv
aagttttccggcacatcaaccgagacgcccttgcggccgcgttccaacaccagcacgtcgtcaccggcggcaaccaacagcagctcggcaagcccggcgcccaacacgattcccgcctcaccgtcggcaacaccgtcggtaacctgcacctgactatccagtcccacacccgccgtcagggttccgtcaatcagcgccggcaacagccgtgcccgttggtcatcagtaccttctttggcgaccaccgctgaggcgatcacggtcggcacaaacagccccggtgccaccgcacgaccgagctcttcgatcaccaccacaagctcggacaggccatagccagagccaccgtgtcgctcgtcgatatgcaggccgagccagcccagctcggcgaggttctgcc

SEQ ID NO: 2100 - DNA, 400 bp, Mycobacterium tuberculosis H37Rv
cgcagaccctcgacgtcgagcacccgctccaccgtggtcagggtgcagtccaaggcggcgatgtcggcttgacggtcggggtccacagcagccaaggttaccggcatcagcgtctagcatcagatgaccgtcatgtgcaccgcacgactgcggcccagcccattcgcagccccttgcgccgcagccgggcacaacacagaggctcgagtatgcgtccctattacatcgccatcgtgggctccgggccgtcggcgttcttcgccgcggcatccttgctgaaggccgccgacacgaccgaggacctcgacatggccgtcgacatgctggagatgttgccgactccctgggggctggtgcgctccggggtcgcgccggatcaccccaagatcaagtcgatcag

SEQ ID NO: 2101 - DNA, 401 bp, Mycobacterium tuberculosis H37Rv
ggaagtagaggttcagaacggtaccgatgtcgggaatcttgttgatcaactccagcaaaaataccctcgccttcgcgatcattgtcagcgagtacagatggcggtcaaccaattcatcgcgccgctgtcgaccgttctcggcgatggtgatgaggtcgccttcatcccgcaggtagccggaggctgaacaaggggatgaccggccgtgaatgcgctctcatcgtcgccgctgttcggcaacgtgggagttccagtgccggcgtgcagaacgaccgaaattcgccgcacccgaatagtcgggtcgcatagatgaccagcagggatggattcaccatcgtttgggattggaacgggacgctgtgcgacgaccggacaattcttctcgacgcggttgggcagac

SEQ ID NO: 2102 - DNA, 3165 bp, Mycobacterium tuberculosis H37Rv
attcctggtgccatcaacgtgccgtggagcagggccgccaacgaggacggcaccttcaagtccgatgaggagttggccaagctttacgccgacgccggcctagacaacagcaaggaaacgattgcctactgccgaatcggggaacggtcctcgcacacctggttcgtgttgcgggaattactcggacaccaaaacgtcaagaactacgacggcagttggacagaatacggctccctggtgggcgccccgatcgagttgggaagctgatatgtgctctggacccaagcaaggactgacattgccggccagcgtcgacctggaaaaagaaacggtgatcaccggccgcgtagtggacggtgacggccaggccgtgggcggcgcgttcgtgcggctgctggactcctccgacgagttcaccgcggaggtcgtcgcgtcggccaccggcgatttccggttcttcgccgcgcccggatcctggacgctgcgcgcgctgtcggcggccggcaacggcgacgcggtggtgcagccctcgggcgcgggcatccacgaggtagacgtcaagatcacctgatagctaggaaggatgtctgaatggccaatgtggtagctgaaggtgcctacccttactgtcggctcactgatcagccgctgagtgtggacgaagtgctagccgccgtctcgggccccgaacaaggcggcattgtcatatttgtgggaaacgtgcgtgaccacaatgccgggcatgatgtcacgcggttgttctacgaggcgtatccgccgatggtgattcggacattgatgtcgatcatcggacggtgtgaagacaaggccgagggtgtccgcgttgctgtcgcgcaccggaccggtgaattgcaaatcggtgatgccgcggtcgttattggcgcgtcagctccccaccgtgcggaggcatttgacgccgcgcgtatgtgtatcgagttgcttaagcaggaagtgccgatttggaagaaggaattcagctcgaccggtgctgaatgggtcggcgatagaccatgagtccgtctccatcggccctgctcgccgaccacccggaccgcattcgttggaacgcgaaatacgagtgcgctgaccccacggaggcggtatttgcgcccatatcctggctcggcgacgtgctgcagttcggggtgccagaagggccggttctggaactggcgtgcggtcggtccggcaccgcgctggggctagccgcggcgggccgctgcgtgactgcgatcgacgtttccgataccgcgttggttcagctcgagctcgaagcgacccgacgggaattggccgatcgcctcacactggtgcacgccgatctctgctcctggcagtcgggggatggacgctttgctctggtactttgccgactattctggcatccgcccacttttcgccaggcttgcgaggctgtggcgccgggcggtgtagtggcgtgggaggcatggcggcggcccatcgatgtcgctcgggatacccgtcgagccgaatggtgcttgaagccaggccagcccgagtctgaacttcccgccggcttcacggtgattcgggtggtcgacaccgatggttcagagccgtcgcggcgcatcatcgcccaacggtcactgtgaacggtccctggttgtatgcgcacgtcctttgttgagaacccgtttcgcaccgctccgataccgccagtctgatgcaccgaccgcgccgcctcccacccgcggaagctaacgaggtgtgcatgaaaccggggcggttcagcagcccggttaattgacaatctgtgaagaggttcccacgacaatgggcacgttgggctcgcgatgtcgcgcgattcgagcgaggttgggtgacgttcccgtttgaggatctcgccccagggcgatgggttggcgggatgtcgatgtacccggaagagcaaaacgtggcatgcgataacgatccgagaggagtgcgatgacaagcacctcgattccgacgttcccgttcgaccggccggtcccgacggagccgtccccaatgctgtcggaactgagaaacagctgtccggtagccccgatagagttgccctcggggcacacagcatggctcgtcactcgctttgacgatgtaaagggagtgctgtccgacaagcgtttcagctgcagggcggcagcgcacccgtcgtcgcccccgttcgtgccgttcgtgcagctttgccccagcttgttgagcatcgatgggccccaacacaccgcggcccgccgtctgctcgcgcagggcctaaatcccggcttcatcgcacgcatgcggcccgttgtccaacagatcgtcgacaatgcgctcgacgatctggcagccgcggaaccaccggtggacttccaggaaatagtaagtgtccctatcggagaacagctcatggccaagctactcggggtcgagcccaaaaccgtgcacgagctcgcggcgcacgtggatgcggcgatgtccgtgtgtgagatcggcgacgaggaggtgagccggcggtggtcagcactgtgcacgatggtcatcgacatactgcaccgcaagctcgccgaaccgggtgatgacctacttagcacgatcgcccaggcgaaccggcaacagtccaccatgaccgacgagcaggttgtcggcatgctcctcaccgtcgtgatcggaggagtcgacacaccgatcgccgtgatcacaaacgggctggcgagcctgctgcaccaccgcgatcaatatgaacggctcgttgaagacccaggccgtgtcgctcgtgcggttgaagaaatagtccggtttaatccggcaactgaaattgagcacttgcgagttgtcaccgaggatgtcgtcattgccggaaccgcgctatcggcggggagcccagcatttacctctatcacttcggctaaccgcgactccgaccaattcctggaccccgatgagtttgatgtcgaacgtaatccgaacgaacacatagcatttggatatggtccacatgcttgcccggcctcagcgtattcacgcatgtgcttgacgacgttcttcacctcgcttacccagcgatttccgcaacttcaactcgcaagaccgtttgaggatttggaacgacggggtaagggcctacattcggtggggatcaaggaactccttgttacctggccg

SEQ ID NO: 2103 - DNA, 400 bp, Mycobacterium tuberculosis H37Rv
tacggctcggtgattgcgcgtctgaccggtatgcactggtggggcccggcgtccacgtcgatgctggccatgtcggctccatacgtggaatggctggagcggaccgccgcgcagaccaagcagaccgctacccaagccagagcggcggcggcggcattcgagcaggctcatgcgatgacggtgcccccagcgttggtcacaggcatccggggtgccatcgtcgtcgaaacggccagtgccagcaacaccgctggcactccaccttgacccattcagttctcgaccagcacgacaccgtatccgcacaaatgtaaggagctgagacacaatggatttcgcactgttaccaccggaagtcaactccgcccggatgtacaccggccctggggcaggatcgctg

SEQ ID NO: 2104 - DNA, 403 bp, Mycobacterium tuberculosis H37Rv
ccaaacagattcgacaacaccaactgcacaaacgcattacggttggccgccaccagcatcggatgcaccgtcgccgcccgcgccgcctcaaacgcactggccaccgccttggcctgagccgacgcgccagcggcccgcgccgccgcagcagccaaccaccccgcatacggcgccgccgccgcggccatcgccgccgccgccgcaccctgccaggactgacccgccaaccccgaagtcaccgacccaaacgaggacgccgccaccgccaactccgcggccaaacgatcccaagccaccgatgccgcaagcatcggcgcagaccccgcaccggtaaacatccgcaacgaattaatctccggcggcaacaccgaataattcatcagcccagccccttcccctacag

SEQ ID NO: 2105 - DNA, 400 bp, Mycobacterium tuberculosis H37Rv
gccgcaccctgccaggactgacccgccaaccccgaagtcaccgacccaaacgaggacgccgccaccgccaactccgcggccaaacgatcccaagccaccgatgccgcaagcatcggcgcagaccccgcaccggtaaacatccgcaacgaattaatctccggcggcaacaccgaataattcatcagcccagccccttcccctacaggacgtcccggccaatgactcaggcaacggtgcacgtctctgtactcgtagaacaaactgtaggaaaacggcgcgacgaataacggcgatttcgtgaaaattctggttcccgtcagaagcacgccaccctcggccacctcgtttgcgcacgcctagagcccgcggtcggggggtgcggtctggatctccaaagcat

SEQ ID NO: 2106 - DNA, 401 bp, Mycobacterium tuberculosis H37Rv
cctcgagaacggacgggtggccagcacgtaggtagccaacacggccaacggtgccgccaacggcagccatggcacttgcagcgggaacgacgtcgcagccaacccagcgaacgtgaaaccaacggcggcaacggtcgtcggccagctcccggcgacaacaccggccccgtatcggcacaccaggtagacggcggcgcaaaaccccgacaatgcggcaagcacatgcgtcgggccggacaccacgatcatcaccaccgacaacaccacggcaagcgttgccgccaggcgaaacaccgccgccacccctaccgcaatcaccgcggcaagccccacgacaacagccagcccgtgcgatcccacagcggccgaccccaccatcatcagtccgaacaccgtggaga

SEQ ID NO: 2107 - DNA, 401 bp, Mycobacterium tuberculosis H37Rv
ctgcccaccacaccaaaggcgacctcatcgcccagcgccgaaatgatccgcgccaggtcccagcgcgctgcgtgctcgcgatgctcgtccacgaagcccgccgtggcgggcagcacgcgcacgccgtcgcgccggctgatcgcgtcgtggagctccttcatctccgctgcgcttaatgggtatccgcgcgagaagacggggcgcaagaatggggcgaacatgcgccatgagcgctggccgatcggcgtgatcgccgcgccgagcggcgatgtgagcagcggcgtcgtataccaggcgtgggtgtggccgtcggcaaagatgccgccgttggcgagcaggcaagccgtgattcgggtccgctgatcgtttcccgcccgctcgcgatcgatccgccgcgccag

SEQ ID NO: 2108 - DNA, 1748 bp, Mycobacterium tuberculosis H37Rv
gagctgaccgcctgagctaactcacgcccacacttccggccggtctcgatctcccaagccccagcacagctcgtgttcccaatctgttcccaaccagatccttagctatgcgcatgttcccaaaagtgttcccgcccatgaaaacggcccccggagtctcctccgagggccatttcgccggtagcggggacaggattcgatgaaccgccccggcatgtccggagactccagttcttggaaaggatggggtcatgtcaggtggttcatcgaggaggtacccgccggagctgcgtgagcgggcggtgcggatggtcgcagagatccgcggtcagcacgattcggagtgggcagcgatcagtgaggtcgcccgtctacttggtgttggctgcgcggagacggtgcgtaagtgggtgcgccaggcgcaggtcgatgccggcgcacggcccgggaccacgaccgaagaatccgctgagctgaagcgcttgcggcgggacaacgccgaattgcgaagggcgaacgcgattttaaagaccgcgtcggctttcttcgcggccgagctcgaccggccagcacgctaattacccggttcatcgccgatcatcagggccaccgcgagggccccgatggtttgcggtggggtgtcgagtcgatctgcacacagctgaccgagctgggtgtgccgatcgccccatcgacctactacgaccacatcaaccgggagcccagccgccgcgagctgcgcgatggcgaactcaaggagcacatcagccgcgtccacgccgccaactacggtgtttacggtgcccgcaaagtgtggctaaccctgaaccgtgagggcatcgaggtggccagatgcaccgtcgaacggctgatgaccaaactcggcctgtccgggaccacccgcggcaaagcccgcaggaccacgatcgctgatccggccacagcccgtcccgccgatctcgtccagcgccgcttcggaccaccagcacctaaccggctgtgggtagcagacctcacctatgtgtcgacctgggcagggttcgcctacgtggcctttgtcaccgacgcctacgctcgcaggatcctgggctggcgggtcgcttccacgatggccacctccatggtcctcgacgcgatcgagcaagccatctggacccgccaacaagaaggcgtactcgacctgaaagacgttatccaccatacggataggggatctcagtacacatcgatccggttcagcgagcggctcgccgaggcaggcatccaaccgtcggtcggagcggtcggaagctcctatgacaatgcactagccgagacgatcaacggcctatacaagaccgagctgatcaaacccggcaagccctggcggtccatcgaggatgtcgagttggccaccgcgcgctgggtcgactggttcaaccatcgccgcctctaccagtactgcggcgacgtcccgccggtcgaactcgaggctgcctactacgctcaacgccagagaccagccgccggctgaggtctcagatcagagagtctccggactcaccggggcggttcacgaacctgcgacctctgggttatgagctaaccagtcgcaatctctcccatcgcggtcggtctcatacgtccagatcagcctctattccgccgtccagcctgttccgccgcgtcgcggttgtacggatttgaaccgccccggcatgtccggagactccagttcttggaaaggatggggtcatgtcaggtggttc

SEQ ID NO: 2109 - DNA, 1748 bp, Mycobacterium tuberculosis H37Rv
gctcaacgccagagaccagccgccggctgaggtctcagatcagagagtctccggactcaccggggcggttcacgaacctgcgacctctgggttatgagctaaccagtcgcaatctctcccatcgcggtcggtctcatacgtccagatcagcctctattccgccgtccagcctgttccgccgcgtcgcggttgtacggatttgaaccgccccggcatgtccggagactccagttcttggaaaggatggggtcatgtcaggtggttcatcgaggaggtacccgccggagctgcgtgagcgggcggtgcggatggtcgcagagatccgcggtcagcacgattcggagtgggcagcgatcagtgaggtcgcccgtctacttggtgttggctgcgcggagacggtgcgtaagtgggtgcgccaggcgcaggtcgatgccggcgcacggcccgggaccacgaccgaagaatccgctgagctgaagcgcttgcggcgggacaacgccgaattgcgaagggcgaacgcgattttaaagaccgcgtcggctttcttcgcggccgagctcgaccggccagcacgctaattacccggttcatcgccgatcatcagggccaccgcgagggccccgatggtttgcggtggggtgtcgagtcgatctgcacacagctgaccgagctgggtgtgccgatcgccccatcgacctactacgaccacatcaaccgggagcccagccgccgcgagctgcgcgatggcgaactcaaggagcacatcagccgcgtccacgccgccaactacggtgtttacggtgcccgcaaagtgtggctaaccctgaaccgtgagggcatcgaggtggccagatgcaccgtcgaacggctgatgaccaaactcggcctgtccgggaccacccgcggcaaagcccgcaggaccacgatcgctgatccggccacagcccgtcccgccgatctcgtccagcgccgcttcggaccaccagcacctaaccggctgtgggtagcagacctcacctatgtgtcgacctgggcagggttcgcctacgtggcctttgtcaccgacgcctacgctcgcaggatcctgggctggcgggtcgcttccacgatggccacctccatggtcctcgacgcgatcgagcaagccatctggacccgccaacaagaaggcgtactcgacctgaaagacgttatccaccatacggataggggatctcagtacacatcgatccggttcagcgagcggctcgccgaggcaggcatccaaccgtcggtcggagcggtcggaagctcctatgacaatgcactagccgagacgatcaacggcctatacaagaccgagctgatcaaacccggcaagccctggcggtccatcgaggatgtcgagttggccaccgcgcgctgggtcgactggttcaaccatcgccgcctctaccagtactgcggcgacgtcccgccggtcgaactcgaggctgcctactacgctcaacgccagagaccagccgccggctgaggtctcagatcagagagtctccggactcaccggggcggttcaattcgtttcggcctgttctgttcccaaatccgttcccaacacagcaatcagcagcaatcccaggccgaaatcggtcagactcttggtggacctacagcacctcgcctccatgtggtcgcggagctagtgagggtccatcggcagcaccacttagggcgcctccgttgtcatcatggtcgataagcggtagcgt

SEQ ID NO: 2110 - DNA, 400 bp, Mycobacterium tuberculosis H37Rv
ctagagatgtgttgcgacaccgcctagaaaccaccttgccgacacctgatcagttttcggttgccgctgacacaatgaacatggcccgcttcacccgttcagcgtcacgtggataagcggcccgtagcgcgtcccagtcggtttcggagtagtcgggccgttgtacaggggcatccggcgcggccggtggcggcatcttgatgccgccaccggccgcgtcacggttcgcggttggcgctcgcctgacgacggtgctgctcccgttcctgagcacgctgctttctagccttgcggtctccctgctttcccatctcccggtcctcccggcgggtcacgatagccgcgcactccgacatacctggcgcggcgcggggcgctgcgaaccggatgggcgccacca

SEQ ID NO: 2111 - DNA, 400 bp, Mycobacterium tuberculosis H37Rv
aggctctggccaaggtgtcgagcacgtcctctgtcagggtgcgctcgttgcggtgcttgtccagcgtttcgatgatcgctctgaacagggcgtcggcagcgtcgtgctgcgttgatcttgctgacatggtttcttgcggtccaccctcctgcacatttcactgatgcggccaacaccacaacgcttgtcggcgcttgtcgacgcttgtcgactcggggcaagctcaaccgtccgcacccaggcagttgttaccagatcaacaccccgaccggataaccgtcatggatgatgggagtgtgtcagatatcaaacggggccgcgccgcgcgcaatgcgaagctggccagcatcccggtcggcttcgccggtcgggcggcgctcgggctcggcaagcgactgac

SEQ ID NO: 2112 - DNA, 401 bp, Mycobacterium tuberculosis H37Rv
gtcgtcgaccaagccttcgtcgttccggtcgccgacgacgaagaaatcgaccggtagcaggcgtcgccgggctggcatcatcgacgcgtgatcatcgaccttcacgtacagcgctacggcccgtcagggcccgcgcgggtgctgaccatccacggagtgaccgagcacgggcgcatctggcaccggttagcccatcactttgcccgaaatccccatcgccgcacccgatctgctgggccacggtaggtcaccatgggccgcgccgtggaccatcgacgccaacgtgtccgccctggcagcactcctcgacaatcagggcgacggtccggtagtggtggtcggacactccttcggcggcgctgtcgctatgcacctggccgcggcccgcccagaccaggtcg

SEQ ID NO: 2113 - DNA, 403 bp, Mycobacterium tuberculosis H37Rv
gtgtcgatgggtccttgcggatggtgatcgtgcgatagctcatctccagcgcgtcgtacaccagcaaccggccaagcagtgtttcacctatcccggtgatcagcttgatcgcctcagtgcccatcaccgatgcgaccgaggcacagataatgcccagcaccccgccttcagcacaggacggcaccatgcccggcggcggcggctcgggatacaggtcgcggtagttgacacccaacccgtcgggggcgtcctcccaaaacaccgatgcctggccctcgaagcggtaaatcgacccccacacgtacggcttgccagccagcaccgcggcgtcgttgaccagataccgggtggcgaagttgtcggtgccatccaagatcaggtcgtactgcttgaacaggtcgac

SEQ ID NO: 2114 - DNA, 400 bp, Mycobacterium tuberculosis H37Rv
tggcaggtcaactcctggtgccggtcaccggcgggatcggtgtctatgacccggtcagcggtgccaacaaccgttatatcccggtgacccggccgccaagcacgtcagcagtgatcccggcagtttctggatccagggtcattgagcaacgtggcgacacactagtcgctctgggttgatcgcctatgttggcgcgagcagacgcaaaatcgcccgaaaccgatggctttcgggcgattttgcgtctgtcgcgctacaggtccaccgtgaaggtgggcagcggcctacctgtcttccagtgtttgagcagcgcctgcgccagctcgcggtaggccaccgcgcctttgttcttgcgcccagccatcaccgacgagcccgaggcgctggcctcagcgaagcg

SEQ ID NO: 2115 - DNA, 400 bp, Mycobacterium tuberculosis H37Rv
acccggtcagcggtgccaacaaccgttatatcccggtgacccggccgccaagcacgtcagcagtgatcccggcagtttctggatccagggtcattgagcaacgtggcgacacactagtcgctctgggttgatcgcctatgttggcgcgagcagacgcaaaatcgcccgaaaccgatggctttcgggcgattttgcgtctgtcgcgctacaggtccaccgtgaaggtgggcagcggcctacctgtcttccagtgtttgagcagcgcctgcgccagctcgcggtaggccaccgcgcctttgttcttgcgcccagccatcaccgacgagcccgaggcgctggcctcagcgaagcgcacagtacgggggatgggcggagccagcacctgtaggtcgtagcggtc

SEQ ID NO: 2116 - DNA, 400 bp, Mycobacterium tuberculosis H37Rv
gtgaccggcccgcatcgtcacaccacccaggcccattgccgtcctcctcaacgggccgacccggcccgcatcgtcacacggcctaggcccattgccgtcctcctcaacgggccgacccggcccgcatcgtcacacggcctaagcccattgccgtcctcctcaacgggccgacccggcccgcatcgtcacacggcctaagctcgtgcgtcatgcgtgcagtgctgatcgtcaaccccactgcgaccgccaccacaccagccggccgcgacctgctggcgcacgccctcgaaagccgccttcagctcacggttgagcacaccaaccaccgcggtcacgggaccgaactcggacaggcggcggtagccgacggggtggacctggtcgtggtgcatggcggcga

SEQ ID NO: 2117 - DNA, 400 bp, Mycobacterium tuberculosis H37Rv
accgcaagtacagcaaggccaaccacggcaagcggcccaattcctaacgcactgcgctagggccctccacggatgatggtggtccggcggatctctagccgaagacgctcccgcaagccctcgggggccctgtcgcctcggcacttggtcccgatcaacgccttgatccgttcctcgagcccgtaatgcctcaggcacccgggcaggcctcgaggtgtcgccgcagcctctcgcgggtttccggggtgcattcaccgtcaagcagggtccacacctcggcgatcacttccgcgcaacccatgccgccgtgggaatcgtcgtggtccgcgtgcgcatcggtcggaccgcaattttcgctcactggtgcaccatccttgtgtcggtgatctcggatggattg

SEQ ID NO: 2118 - DNA, 400 bp, Mycobacterium tuberculosis H37Rv
ctcccccaccgggaggtcaaccaagaacggtgtcacctggctgatcgcctgaccagggccggttgagtcgagttggtcgtcggcatagaccgacagcggcgccatcgcccgaacagtcgcggtcggtgccacagcttcaccgcgtgacatcagccagttgcccaaggcaccggcaatcaccgtcagcaccacgtcgtggagtcacagtcgtagcgagcccgcaccgtgcgatagtcatcaagacttgcacgggcaaccgtaaatcgccgattacgcgacacggtggcattgagcgggctactgggcgcggtgccccgtgccaccgtgcgggcgatatcgagaaccttgcggcccgtctcgacgagttggccggaattcgttaccaacccggcgaccgcgg

SEQ ID NO: 2119 - DNA, 412 bp, Mycobacterium tuberculosis H37Rv
cccgctgcggcgatccgcgacagcagatgggtgaggaacggcagtccggcggtaggcagcattggcttgggcgccgacagcgtcaacggccgcagtcgggtacccttgccaccgaccaggaccaccgcatcgacttggtgagttgccaactcagtgccgcccttctaccagcttcagtttccgtctgcgggacctgcgcagtgaactgcgcaccatgaggtgggaacgcagcgccagtgatccccgcagggtccagcgcagcggagcccgccaccaaccagaatgtcggtcggctaagaagatataggtgcttttgtgatgggcggccagatggcttgccgggtcgcgacccgtcgaatgcgccttgtggtgcagaacctcggctgacggcacatacaccgacagccaaccg

SEQ ID NO: 2120 - DNA, 453 bp, Mycobacterium tuberculosis H37Rv
gagtcgagtgagcggaacgaacgaagtgagtgacgggaacgagacgaacaatccggcagaagtgagtgacgggaacgagacgaacaatccggcagaagtgagtgacgggaacgagacgaacaatccggcccctgtgagtcgagtgagcggaacgaacgaagtgagtgacgggaacgagacgaacaatccggcccctgtgagtcgagtgagcggaacgaacgaagtgagtgacgggaacgagacgaacaatccggcccctgtgaccgagaagccgctgcatccgcacgagccccacatcgagatactgcggggacaacccaccgatcaggagctggccgcgttgatcgcggtgctgggcagtatcagcggttcaaccccgcccgcgcaacccgagcccacccggtgggggctgccggtcgaccagttgcggtaccccgtcttcagttggcagcg

SEQ ID NO: 2121 - DNA, 403 bp, Mycobacterium tuberculosis H37Rv
cgcctcgacatcctcaacgaggtcgacggggtgtggcgctgccgcaccacgttcaactgcaccgaatcctgcccacggggcattgaggtgaccaaggcgatccaggaggtcaagcgcgcgctgatgttcacccgctgagggcttgcgcgagcagacgcaaaatcgcccgaaaaccagtggttttgggcgattttgcgtctgctcgcgcagccgggtctacagcgttgccaggtgctgtttggttgcgccaggaaccgcagtcaacgcaatcgactgatcgaaggtgacaaatcggccatcatgagcgaccgcgagggccagcaagtacgcgtcggtgacctgtttggggctgtgcaggcgggaacgatcgatgacctttgagtcgagaatgctgacggtgcag

SEQ ID NO: 2122 - DNA, 400 bp, Mycobacterium tuberculosis H37Rv
taccggctttagtgtcggctctatgcgcagtccgatacgcgtgggttcgggagagccggtcctactgctacacccgttcttgatgtcccaaacggtgtgggagaaggtcgcccagcagctggccgacaccggccgcttcgaggtatttgcccccacgatggccggccacaacggcggaccggcctcgggcacccggttttgtcctcggcggtgctggccgaccacgtcgaacgccagctcgacgaactgggctgggaaaccagccatatcgtcggcaactcgttgggcggctgggtcgcgttcgaactcgaacgacgtggccgggcacgcagcgtgaccggtatcgccccggcgggcggttggacccgctggagtccggtcaagttcgaagtgatcgcta

SEQ ID NO: 2123 - DNA, 401 bp, Mycobacterium tuberculosis H37Rv
ccttgccgcccgcgccgccggtggagccagggccgacaccgtcgccgcccttgccgccattgccgcctgagccggcgttgccggcatcgccaccgccaccgttgccgccggcaccgccgttgccaccggcaccaccggcgccgccgttgccggccgagccagcgccgccgttgccaccggcaccaccgctgccgccgtgggccgccggactggcctgtgctcaggctgcccccgccagcaccggcgccgccgttgccgccggccgcgccggcgccgcccgtggtgccgctgccaccgctgccgccgctgccgccgtggccggcggcgctggaagtgccgccgccgttgccgccggcgccggcggcaccaccggccaagcccgcgacgccggtgctgttgcc

SEQ ID NO: 2124 - DNA, 400 bp, Mycobacterium tuberculosis H37Rv
ccgttgccaccggcaccaccggcgccgccgttgccggccgagccagcgccgccgttgccaccggcaccaccgctgccgccgtgggccgccggactggcctgtgctcaggctgcccccgccagcaccggcgccgccgttgccgccggccgcgccggcgccgcccgtggtgccgctgccaccgctgccgccgctgccgccgtggccggcggcgctggaagtgccgccgccgttgccgccggcgccggcggcaccaccggccaagcccgcgacgccggtgctgttgccggagttgccgccgttgccgccgttgccgccgtcgccgccggtggcaccgccgccgtggccgccgttgccggcgctgccgccggcaccgccctggccgccggcgcccgcggagccg

SEQ ID NO: 2125 - DNA, 510 bp, Mycobacterium tuberculosis H37Rv
gccagcaccggcgccgccgttgccgccggccgcgccggcgccgcccgtggtgccgctgccaccgctgccgccgctgccgccgtggccggcggcgctggaagtgccgccgccgttgccgccggcgccggcggcaccaccggccaagcccgcgacgccggtgctgttgccggagttgccgccgttgccgccgttgccgccgtcgccgccggtggcaccgccgccgtggccgccgttgccggcgctgccgccggcaccgccctggccgccggcgcccgcggagccgttgccgccgttgccgccattgccgccgttgccgccgtggccggcggtgacgttgacgacgcctgagccgctggcggcaccgctgctgccgttgccgcccttgccgccggcgccgcccgtcgtgccgtcgccgccgtggccgccgttgccgccgttgccgccgtcgccgcccacagcgttgccgaaggacacgccggcgacacccgcgttgccgccggccccgccagc

SEQ ID NO: 2126 - DNA, 400 bp, Mycobacterium tuberculosis H37Rv
cgcccttgccgccgtcaccgccgttgccgcccgcgacggtggggctggcgccgttgccgccgttgccgccgtcaccgccgctggtgggtgcggtgccatcggcgccggtcgcacccttcatggctggaatggcgcccttgccgccggccccaccctggccggcaacgcccacattgccgccgttgccgccggcaccgccgttgccggccttagcgaacgtggcgaaggcgtcaccacccttgccgccgatgccgccgttgccgccgttgccgccctgtccgccattcgcgccattggcggacgcggagaagtcttggccgttggctccggcgcccccgttgccgcccttgccgccgtccccgcccgtgccggccgccgatccgccgttgccgccgatgcc

SEQ ID NO: 2127 - DNA, 409 bp, Mycobacterium tuberculosis H37Rv
acgtggcgaaggcgtcaccacccttgccgccgatgccgccgttgccgccgttgccgccctgtccgccattcgcgccattggcggacgcggagaagtcttggccgttggctccggcgcccccgttgccgcccttgccgccgtccccgcccgtgccggccgccgatccgccgttgccgccgatgccgccgttgccgccgttgccgccgttgagggcaaggccggtgccggcgacgccatttccgccggcaccacccgcaccgccgttaccgaccgacccgccatggccgccgttaccaccggcgccgccgttttctcccgcgacggtgggggtggcgccggcacctccgttgccaccgttgccgccgctggtgggcgcggtgccgttcgccccggccgaaccgttcagggc

SEQ ID NO: 2128 - DNA, 400 bp, Mycobacterium tuberculosis H37Rv
ccgctggtgggcgcggtgccgttcgccccggccgaaccgttcagggccgggttcgcgctaacaccgccggccccacccttgccgccaacgcccacttcaccgccgttgccgccgtcaccgccggcaccctggttgacggccaaggtcacatcaccggcggcaccggctccgccatcaccggccttgccgccgtcaccgcccttgccgccgttgccgcccataccgccatcggcaccgggcgaacccaaggtggcggcgtcgaatccgtttccgccggcgccgccgctaccgccggcaccgcccttgccgccgacgccgccgtcgccgtgctgggcgccgccatttccgccattaccgccgtggcccccggcgccgccattggtgccgttaccgcccgtcg

SEQ ID NO: 2129 - DNA, 401 bp, Mycobacterium tuberculosis H37Rv
gttgttgacggcgaaactcggatcgccagcgccgcccttaccaccgtcgccgccgacgccgccggccccgccggccccgccgttgccaaccaataacccgccgcgcccgccgttgccgccggttccgccgttgccgccgtcgctgccgtcgccgccgttgaggccggcggcacccggcaggcccgcggccccggcccccccggcgccgccgttcccgaacagcccggcgtcgccaccgttgccgcctatacctccgatgccgccgatcccgccggcgccgccgttgccgtagacaaatccgccggacccgccgacgccaccattggtgccggcgccgccggacccgccggccccgaacaaccaggcgttgccgccggcaccaccgttagcgccggtcccgc

SEQ ID NO: 2130 - DNA, 401 bp, Mycobacterium tuberculosis H37Rv
ccggagttgaacaggccaatgttgccggcaccggagttcaagccgccgatgccggtctggttgtcgccggtcagcccaatcccgaggttgttggtgccggtgttggcgaacccgatgttgcccacacccatgttggccaggccaacgttggtgctgcccgcattgcccaacccgatattgccgatgccgagcgccgcccccaggcccgaattgccaaacccgacgttgccgtggccgatattgccgaagccgacgttggcgttcccgatattgcccaaccctaggttgaggtcgccgaggttggccgcgcccaggttgaagtccccaacgttgcccaacccgaggttgtagttgccgacatcggccaacccgaggttgatgatggggctttgggtcaacgc

SEQ ID NO: 2131 - DNA, 669 bp, Mycobacterium tuberculosis H37Rv
tcacacctcatcgtctcaccacgacgtggtgagcgcgggcacttcgacaaactaatctgcaatatcccgatcgcgtacaaacgtgccgacatttgcggcgcattaatgcccatatcggcttgtatctcttgtagtgccgctttgacggggtggtggtcaggtacggtggcctcgggagaggctggagggctcgacgttttcggctgagtgtctgggcccgtgaaagagatcgtctgctccagctttgtctcctgaactgacccggtttagggaattggtggccaggttgcggaagtgcgcagcatcgacgtgtacctgggtgaggcatcgaatcatcgacaagcaccggagccgcgcgtgaactcccgccgcgttgtggtcggggatgatgtgggagaccggccggcagtgctgtgtacgaaggttctcccaccgcaacgagttcacgcacgacggtcggctgggtgggccctggaatacgtgaactcttcatcaacacaacatgattgacgatgaaggggagaacctccatgcacaacaacgctaacccgtgactgccgagaatccaggacggagcaggcggacgctggtcggaatcgacgcggcgatcacggcctgtcaccacatcgcgatccgcgatgatgtcggtgcgaggtcgattcgattcag

SEQ ID NO: 2132 - DNA, 405 bp, Mycobacterium tuberculosis H37Rv
cgtaggcagcggcggggtcgatggccaccgtactggatgctctcccggaactgcggtgtgcgcgcttgcagccatgccagcaccgccgcgccgccgcggccttcatgctgccccataaacccctgatcaccggccaggtcgacgaacccggtatcccacgggtcgacccgtacccaccggccagtcttggcgcagcgctcccatctgggttttcctcgccgtgtctggtcaacgcccagcaccggggtgggcaacggctcggtcaatacccgtctcggcgtaggcaacaaacgcccgatgtgccgtcggccacgacacggcgtcagcctgggcgacctcggcccaccgagcgggccgcatccccgatcgccttggccatctgccgacgcagccgcagcgtgctgc

SEQ ID NO: 2133 - DNA, 401 bp, Mycobacterium tuberculosis H37Rv
gcccgacagcaccgccggcgtcccgagcggcaacacgctggtgttgtagatccccgagacacccgagccgacgttgagcacacccgagcccagcgtgccgacattcaacacccccgatcccgaccccgccagcgcgctcgccgcctggttccaccagcccgacaggttcgacccgacgtttccgaaccccgacaccccaccggcgccggagttgaagaaccccgacgacggggtcgccgtggtgttgccgaaccctggcgtcggcgggacatcgatgatcgggatgctgctgtcgggcacggtgagattcagcgccaggtgcagcggcagcgggtcgatcgtgtacccacccgggaaaatcgtgatcggatccagcgcgccggacgcatcgatcgttaacg

SEQ ID NO: 2134 - DNA, 400 bp, Mycobacterium tuberculosis H37Rv
cccgcaaacacctcgatcgccaacgcaggcgccggcgggaacggcgccgccggcggtgacggcggtgccaatggcggtgcgggcggcgccggcgggcaggccgcgtccgccggtagttccgtcggcggtgacggcggcaacggcggtgccggcggtacgggcacgaacgggcacgccggcggtgcgggcggcgccggcggtgccggtggtcgcggcgggtggctggtcggcaacggtggcaacggtggcaacggtgccgccggcggcaacggcgccatcggcggtaccggtggtgccggcggcgtccccgccaaccagggcggtaacagcgccctaggcacccagccggtcggcggcgacggcggcgacggcggcaacgggggcaccggaggcaccggcg

SEQ ID NO: 2135 - DNA, 400 bp, Mycobacterium tuberculosis H37Rv
cggcgggaacggcgccgccggcggtgacggcggtgccaatggcggtgcgggcggcgccggcgggcaggccgcgtccgccggtagttccgtcggcggtgacggcggcaacggcggtgccggcggtacgggcacgaacgggcacgccggcggtgcgggcggcgccggcggtgccggtggtcgcggcgggtggctggtcggcaacggtggcaacggtggcaacggtgccgccggcggcaacggcgccatcggcggtaccggtggtgccggcggcgtccccgccaaccagggcggtaacagcgccctaggcacccagccggtcggcggcgacggcggcgacggcggcaacgggggcaccggaggcaccggcgggcgtggcggcgacggcggatccggcggcgcg

SEQ ID NO: 2136 - DNA, 404 bp, Mycobacterium tuberculosis H37Rv
aatccacaacggcgcgtatggcggttcgcagtgttgcgatagccacccacccgcgcgactgatctgcgccgacaaggatgtgccgctgtgcctctgccaatgcgccagagcttgaatgcaatatgctgtctcttccgcagtcgcttggccgtcgaaaaatccccacgagccatcgggcctctgcgtattaagaatccacccaatcgcatctgagcatagggcatcatcatagttactggcagcacatatcagatgcgcagtcgtataatatgccgatcggtgccacttatcccgccagcagaaccgtccaggctccttgcttgatcggatgaattccagaacctttcgtactcgtggatgacatttgtcgtagcccgcctgcttcaacgcaccgagcacgtgga

SEQ ID NO: 2137 - DNA, 400 bp, Mycobacterium tuberculosis H37Rv
cctgcagggccaatgctttggcgatgccgtccacccaggcgaggctgaccgaggcatgggagttctcgacccagtcatgtggcgattcatggcggttgggataccccgatagaccatcggcctggcgcagcgtggcgaagtctttaccgcggccggtgagcagcttgtgcggataggtttggtgcccggtgtcgaacaccgatgtcgtgtggcgaggtgaacacccgatgcaatgcgatggtcagctctaccatgccaagtcccgcgccgagatggccaccggtagccgtcactgtttctatgagccgccgacgcatctgcacggccagctctggcagctggctttcgggcaatgcctgcacatcgcaaggtccgccgatcgcggtaattgaaccgcccc

SEQ ID NO: 2138 - DNA, 1748 bp, Mycobacterium tuberculosis H37Rv
tgtcgaacaccgatgtcgtgtggcgaggtgaacacccgatgcaatgcgatggtcagctctaccatgccaagtcccgcgccgagatggccaccggtagccgtcactgtttctatgagccgccgacgcatctgcacggccagctctggcagctggctttcgggcaatgcctgcacatcgcaaggtccgccgatcgcggtaattgaaccgccccggtgagtccggagactctctgatctgagacctcagccggcggctggtctctggcgttgagcgtagtaggcagcctcgagttcgaccggcgggacgtcgccgcagtactggtagaggcggcgatggttgaaccagtcgacccagcgcgcggtggccaactcgacatcctcgatggaccgccagggcttgccgggtttgatcagctcggtcttgtataggccgttgatcgtctcggctagtgcattgtcataggagcttccgaccgctccgaccgacggttggatgcctgcctcggcgagccgctcgctgaaccggatcgatgtgtactgagatcccctatccgtatggtggataacgtctttcaggtcgagtacgccttcttgttggcgggtccagatggcttgctcgatcgcgtcgaggaccatggaggtggccatcgtggaagcgacccgccagcccaggatcctgcgagcgtaggcgtcggtgacaaaggccacgtaggcgaaccctgcccaggtcgacacataggtgaggtctgctacccacagccggttaggtgctggtggtccgaagcggcgctggacgagatcggcgggacgggctgtggccggatcagcgatcgtggtcctgcgggctttgccgcgggtggtcccggacaggccgagtttggtcatcagccgttcgacggtgcatctggccacctcgatgccctcacggttcagggttagccacactttgcgggcaccgtaaacaccgtagttggcggcgtggacgcggctgatgtgctccttgagttcgccatcgcgcagctcgcggcggctgggctcccggttgatgtggtcgtagtaggtcgatggggcgatcggcacacccagctcggtcagctgtgtgcagatcgactcgacaccccaccgcaaaccatcggggccctcgcggtggccctgatgatcggcgatgaaccgggtaattagcgtgctggccggtcgagctcggccgcgaagaaagccgacgcggtctttaaaatcgcgttcgcccttcgcaattcggcgttgtcccgccgcaagcgcttcagctcagcggattcttcggtcgtggtcccgggccgtgcgccggcatcgacctgcgcctggcgcacccacttacgcaccgtctccgcgcagccaacaccaagtagacgggcgacctcactgatcgctgcccactccgaatcgtgctgaccgcggatctctgcgaccatccgcaccgcccgctcacgcagctccggcgggtacctcctcgatgaaccacctgacatgaccccatcctttccaagaactggagtctccggacatgccggggcggttcaaatcaagtccccgcgtccgttgcgaatcgtggttgtcattgcgcgcgaacctgtttgggaaggccgaatcgcaccgtctcggtcgctatcgagcgttccaccacggtgatcgaggcgtatccgcgaagtgcatcaatcacctgccccaccagtcgtggcggcgcggaggctcccgcggtgacaccgatcgtcg

SEQ ID NO: 2139 - DNA, 465 bp, Mycobacterium tuberculosis H37Rv
cgatcaacgcgcccacccagacactgttcggccgcccgctgatcggcgacggcgccaacgggaccgcggagaacccggacggccaaaacggcggcctgctgttcggcaacggcggcaacggctttacccagacgaccgccggggtggccggcggcaacggcggcagcgcggggttgatcggcaacggcggggccggcggcggcggcggggccggcgccgccggcggcctcggcggcaacggcgggtggctgtacggcaacggcggggccggcggcatcgggggcgcgggcaccggaaccggtggtcacggcggggccggcggggccggcggccgggcctggctgtggggcaccggcggggccggcggagccggcggtgacggcggctggttgttcggcgacggcggggccggcggcaccggcggcaacggcggcagcggctttaacagcttgacctcttcggtcg

SEQ ID NO: 2140 - DNA, 400 bp, Mycobacterium tuberculosis H37Rv
gatcggcaacggcggggccggcggcggcggcggggccggcgccgccggcggcctcggcggcaacggcgggtggctgtacggcaacggcggggccggcggcatcgggggcgcgggcaccggaaccggtggtcacggcggggccggcggggccggcggccgggcctggctgtggggcaccggcggggccggcggagccggcggtgacggcggctggttgttcggcgacggcggggccggcggcaccggcggcaacggcggcagcggctttaacagcttgacctcttcggtcggcggcgccggcggggccggtgggcacgccgggctgttcggcgccggcgggaccggcgggaccggcggcatcggcgggcaaaacaccgagaccggcccggccgccagcaac

SEQ ID NO: 2141 - DNA, 409 bp, Mycobacterium tuberculosis H37Rv
accgagaccggcccggccgccagcaacggcggcgcgggcggcgccggtggcggcggcgggtacctggtcggcgatggcggcgccggcgggaccggcggggccggcgggaagaattccagcggtggcgccaccctcaccgggggcaccggagggaccggcggggccggcggggcggccgggtggctctacggcagcggcggcgccggcggtgccggcggcgccggcgggctcaacaacgccggtggtgccaccggcggcaccggcggtaccggcggagccggcggctctggagcgtggctgtacggcaacggcggggccgccggggccggcggcaacggcggcaacaataccagcgccggcaccggtggtgtcggggctagcggcgggaccggcggaaacgccgggctga

SEQ ID NO: 2142 - DNA, 400 bp, Mycobacterium tuberculosis H37Rv
gcgttggtgcggccggcgggcttgccgggcagatcggcaacggcggtagtggtgggtccggcggtgccgggggcaacggcgggaccggcgataccgccggcaacggtggcaatggtggtgccggcgcggtcggcggcaacgcccagctcatcggcaacggcggcaacggcggtggcggcgggaacggcggaaccggcgccgacggcacctaaggcccgcgagcagacgcaaaatcgcccaatttcgtgccgaattgggcgattttgcgtctgctcggcgcagctaacccgccacgtactccaccgcgccgtcgtcgagcaccacccgggcctcggcgccgtcggagccggccacctcggtgcggaacaccgcccggcccggctcggtgcgccagatcacc

SEQ ID NO: 2143 - DNA, 400 bp, Mycobacterium tuberculosis H37Rv
caccgtccaccatcgccgtgcgcacccgtaagccgctgctgccgccaccaccgcagccgccaggccgcgagccagtgcaccgccgggctttagcccggtgacgatacgggccgcgtagcggcccgaggaggagccgggcaatcggcttagcccggtgacgatgcgggccgcgtagcggcccgaggaggagccgggcaatccagcctgagcccggtgacgatgcgggccgcgtagcggcccgagaaggagccgggcaatcggcttagcccggtgacgatgcgggccgcgctgggggcaccatccgcttgcggggacgcgtctgcgtctacctgggcggcaccggtgaacgtctcattcaccgcgcacctccgcttcctgcacggcggcgacgacccgggca

SEQ ID NO: 2144 - DNA, 5316 bp, Mycobacterium tuberculosis H37Rv
tcgacgagctggatgagaactggaaaggtagttcgtcggacttgttggccgacgcggttgagcggtatctccaatggctgtctaaacactccagtcagcttaagcatgccgcctgggtgatcaacggcctcgcgaacgcctataacgacacacgtcggaaggtggtacccccggaggagatcgccgccaaccgcgaggagaggcgcaggctgatcgcgagcaacgtggccggggtaaacactccagcaatcgcagacctcgatgcacaatacgaccagtaccgggcccgcaatgtcgctgtaatgaacgcctatgtaagttggacccgatctgcgctatcggatctgccccggtggcgggaaccgccgcagatctacaggggcgggtaggtccaagaggccggcgcggtcttgcaggccagcaacaatgccacggtcgaccaggcccatcgcttccgggcccgcacgacacaccgcggtttcagatgaatcaggcgtttcacaccatggtgaatatgctgctgatccgtttacacgtcaggttcgactgatctagcttcaggttcgactgatctagctgaaaaccaaaccggcacagcgacattaccatacctgacaacagccgtcaccaaccgaaaggagcaaagaacaagcagatgcatctaatgatacccgcggagtatatctccaacgtaatatatgaaggtccgcgtgctgactcattgtatgccgccgaccagcgattgcgacaattagctgactcagttagaacgactgccgagtcgctcaacaccacgctcgacgagctgcacgagaactggaaaggtagttcatcggaatggatggccgacgcggctttgcggtatctcgactggctgtctaaacactcccgtcagattttgcgaaccgcccgcgtgatcgaatccctcgtaatggcctatgaggagacacttctgagggtggtacccccggcgactatcgccaacaaccgcgaggaggtgcgcaggctgatcgcgagcaacgtggccgggggtaaacactccagcaatcgcagacctcgaggcacaatacgagcagtaccgggccgaaaatatccaagcaatggaccgctatctaagttggacccgatttgcgctatcgaagctgccccgatggcgggagccgccgcagatccacaggagcgggtaggtccaagaggccggcgcggtcttgcaggccagcaacaatgccgcggtcgaccaggcccatcgcttcgctgctcgcacgacacaccgcggtttcagatgaatcaggcgtttcacaccatggtgaacatgttgctgacgtgttttgcatgtcaggagaaaccgagatgacgatcaacaaccaggtgagcgacgctgacacccacggcgccaccaccggcgcccctgtcgaccgccacgtaattccccaggggttggcgtcacgtaattccccaggtgtgtgcctcagtggtaggtcttagcggcccgtgtgggcgttgtctagctggtggtgcggccgggtctcttgcggggtcggtagctgggtccgtccatgaggatttggtggctggtgttgatgagccgatccaggagtgattcggcgacgacggggttggggaacaggccgtaccagttattcggtgcgcggttgctggtcaagatcagcggtttgccagtgatggcgcggtcgctgatgagctcgtagaggtcatcagcgtgcatggcggtgtgctcacgcatcgcgaagtcgtccagaatgagcacgagcggcttggtgtattcgcggatgcgttggccccaggatcggtcggcgtgcccgccggcgaggtcggagagcatgcgggaggttttggcgaagcgcacgtcgccgccgcggcgggccacggcgtggacaagtgcttgtgctacatgggtttttccgacgccgaccgggccgtggaggatgaccgattcgccggcatccagccagcgcagcgcggccagatcgcgcaacatcgcaccgggcagtttcgggttggcagtgaagtcgaagtcttcgaaggtggcttgggcttcgaacttggcgcggcgtaatcgtcgtgtcagggcggcggactcgcggcgggcgatctcgtcttcacgcaacgcttgcaggaattccagatgccccaggtcgccgttgcgggtttgggccaggcgggcgtcgagggtgtcgagcatgccggacagtttcagggtacgtagcgcattacgcagcgccggatcacagatagacatggatgcttctccttgagaatagcgatgtggattgtgtcgggatggttcgggattccgctgtgagatcaggcgacggggtgtgtcggtgccgaactgttcagggccgcgcaggaacgcccccagcggtgcttgccggactactggtggtcggctcgttggcggcgtgttcggtgccggcaacaaggatgcccttgatggtgcgatagctcgggtcgccgacctcgatggcgcgggcgcaggcggcctccagccggtcgcagccgtgtttgtcgcgtagcccgagcacgccttgggccgaccgtaggtggtggatggcgttgtcgcgcatgaattcggcgatcacttgctggctggctgggccgaccagttcggcggtgtgtcgacaccaggtcggggtgcgcatgtggaaggcgatcttctccggtgggtagtgggagaagtcggtggagcgcccgctgggtcggcgcacatgggtggccaccacatcgttgccggcgaagatctgcaccacatcaccggcggtgcgcgcgtgcaggcgttgcccgatcagccgccacggcacggaatagagtgccttgccaactttgaggtgcgtgtccaccccgacggtgccgatcgaccagctggtgagttcaaatgccctgggcggcaatgcgatcaacgcttgttgctccacagcttcgaacatccgcaggggttgggcgccctccaaggcacgtaagtaccgaagcccggccacttcggtgctccaggtgaccgccgcctgctgcatctgggccagcgaatcgaactcgcggcctttccaaaacgagtcccgcacataggtcatcggccgctccacgcggggtttatctttgggttttctggcgcgggccgggtcgaccagcgtggcgtagtggctggccagctcggcgtaggagcggttgatctgcgggtcgtacaggtcgggcttgtccaccccggtcctgaggttgtcacacactagccgcgccggcaccccgtcgaagaattcgaatgcggcgacatggcaagcacaccaagcggtttggtccatccggatgaccggacgcacgaacaggtgtcgggagaacgccagcaccatcacgaacgcccacaccgcgacccggcgcgcggtggccgggtcgaaccacatgcccagccgcccgtaatcgatctgcgcctcactacccgcatcgaccggtccgcgcggcaccgtgactctctcgcgggccacctcctcggcgaaatgcgttgcgatccaacgcctcaccgacgactccgacgccgccaccccgtggtcgtcacgcagccgttgggctatcgtggccaccgtgacatcggcatccagccagtccttgatccgatcatgatgcggcgcgatcagcggccacgtcgacgcccgcgccgccggatcattcaggaaaccacccgccgatcaactccgcccactgctcggcgctcagcggctccccaccgggctcgataccggcggcgatcgccggcgccgtatatttgcggaccgtcttgcgatcgatgcccagcgactccgataaccggacctgagagcggcccgcgtgccagtgggtcaacaactcgaccaaatcgagcatcaagatacttctcctcgccatcagcgcccttccatccgtcagccgacggatgcagagcgaaccttgcagcaaggcccacaccgggcagacacaccgcccatggtggggaattacgtgacagccggggtggggaattacgtgacggacaacccctcaaacctggggaaatacgtgaccgctgacacacaggtattgacaattgctcattcaggctcaaattgcctgtgccgcatgatggttggcgttaaagcgtgaggacctgccggatgaattgacgggagcgtagctgtgaccgcggtcccgtcacccgtggcaggaaacagttgcagtgtgtactatccgccctagactgccgcagttccgggggaagtgaacctattgcgcccgtgcatcactgcacgggtatgggctttggcagtcgcttcgcaccatcaacaccgacagtgcgacagcacaaaccgacggcacaccccttgcacggatgcggggtgtctttgagagggagcgaagtagccgtgtcttttatcttcacaaccccccaggcactggacaacgcggctaagtccgtgtcggggattcacgatttgtggcgcaaaggacgctaaggcatcgatcccggtggtcaacgctatttgagccccccgcttccgacccggtgtcgaatagggatgaggccgctcctccgccagcacatgaggcagtatcaccagatcagctttccggccatagagcatcgtcaccgggttaggcatggtttaggcagcgcttagctgagaacgccgaggcgtgtcggctcgccgaggcccaaaacagcacaaccttgcactgatctagctgaagaccaaaccggcacagcagacattgccatacgcgacaacagccgtcatcaaccgaaaggagcaaagaacaaacagatgcatccaatgataccagcggagtatatctccaacataatatatgaaggtccgggtgctgactcattgtctgccgccgccgagcaattgcgactaatgtataactcagctaacatgacggctaagtcgctcaccgacaggctcggcgagctgcaggagaactggaaaggtagttcgtcggacttgatggccgacgcggctgggcggtatctcgactggctgactaaacactctcgtcaaattctggaaaccgcctacgtgatcgacttcctcgcatacgtctatgaggagacacgtcacaaggtggtacccccggcgactatcgccaacaaccgcgaggaggtgcacaggctgatcgcgagcaacgtggccggggtaaacactccagcaatcgcaggactcgatgcacaatatcagcagtaccgggcccaaaatatcgctgtcatgaacgactatcaaagtaccgcccggtttatcctagcgtatctgccccgatggcaggagccgccgcagatctacgggggcgggggcg

SEQ ID NO: 2145 - DNA, 401 bp, Mycobacterium tuberculosis H37Rv
cttgccgcgcagcaggttggccgccgcgacggcaaggcggccaagcaccacgtccgtggcgtcgatgacgtaccacgatcgcgtggtgtcacccgccttgggcgcgtacgtgggcacagcgcttaccttcttttctctcgggtggatcccggggtgccccgggcgccggtcaggcgtgaacggcgggttggtctcggcgaaccgacattgacccgaggtcccggcgtaccgcacgccaaccgagcagcttaccgacgagcatccacgcaggtcaaaatgactgtgtggtcccgacggctctcccccgtcgggaccacacaggggtctgttgcgcgctccggggcccggaactagcgtgcccaagctccagccgcccgccggtcggcatgcgccacgtcgtc

SEQ ID NO: 2146 - DNA, 401 bp, Mycobacterium tuberculosis H37Rv
ggcccccggcggtggtgggcatctccgctctcggcggcatcgcctacctggcggacttcgcgatcggcgccaatgtcggtatcacgtggggtaccgcgaacgcgctgtgcggaatcgcaatcttcgcactggtggtcttcgtcaccggcttgccgctggcctactacgcggcgcggtacaacatcgacctggatctgatttacccgcggtagcggtttcggctactacggctcggtggtcaccaacgtcatctttgccacgttcacgttcatcttctttgccctggagggctcgatcatggctcagggccttaagctaggcctgcacattccgctgtgggcgggttacgcgtgctcgaccctgatcatcttcccgctggtggtctacgggatgaaagtttt

SEQ ID NO: 2147 - DNA, 403 bp, Mycobacterium tuberculosis H37Rv
aattgcccagggtgtagccgaatcccggctccagcggttcgatcacgaactgggatcggttgtcggtgaggacgtcctcggacagggtggggcgctgtgagatcagcatggtgtttcttcttcctttcgacgtccgccatatgacgtctgtgggggcactcgggggcggcgcccccgagggtgggggtactcggggggcggcgccccccgagggttgggttggggggtactcggggggcggcgccccccgagggttgggtttactttgagtagtactcgacgatcagctgctcggtgagtgggacgtcgatctgcgcgcgctcgggtagctggtggatcaggacgcgttgccgctcccccaccacttgcagccagctcgggatcggacgctcgcccgccgtct

SEQ ID NO: 2148 - DNA, 401 bp, Mycobacterium tuberculosis H37Rv
ttcgatcacgaactgggatcggttgtcggtgaggacgtcctcggacagggtggggcgctgtgagatcagcatggtgtttcttcttcctttcgacgtccgccatatgacgtctgtgggggcactcgggggcggcgcccccgagggtgggggtactcggggggcggcgccccccgagggttgggttggggggtactcggggggcggcgccccccgagggttgggtttactttgagtagtactcgacgatcagctgctcggtgagtgggacgtcgatctgcgcgcgctcgggtagctggtggatcaggacgcgttgccgctcccccaccacttgcagccagctcgggatcggacgctcgcccgccgtctcccgggcaatctggaacggcaccgtgttcagggac

SEQ ID NO: 2149 - DNA, 1103 bp, Mycobacterium tuberculosis H37Rv
cacacggttgctcaccccgtccctgctcacggattaccggacccgcgaggcaaccaagcaggcccagaccctcaccagcgctctgctgcgccggctttccacctgtccgccggagtcgggcccggcaaccgaaagccttcccaagagctggtcagccgaactcaccgtcggtggtgacgccgacaaggtgtgccggcagcagatcaccgcgacgatcctgctttcttggtcgcagccgaccgcccagccgctcccacagagtccagccgagctggctcggttcggtcagccggcctacgaccttgcaaaaggatgcgcgctcaccgtcatccgggcggcattccagctggcacgttcggatgctgacatcgccgcgttggcggaagtcaccgaagcaatccaccgggcgtggcgaccgaccgcgtcatccgatctcagtgtgctagtgcggacgatgtgtagcagaccagcgatccgacaagggtcgctcgagaacgccgctgaccagctcgctgccgactatctccaacaatccacggtgcccggcgacgcttgggagcggctcggtgccgccttggtgaacgcctacccgaccttgacgcaacttgccgccagcgcttcagccgactcgggtgccccgacagactctctgctcgcccgggaccatgttgcagccggtcagttggaaacgtacctcagctatctggggacctatccagggcgtgccgacgactcgcgcgacgcaccgaccatggcatggaagctattcgatctcgccacgacgcagcgcgcgatgctcccggccgacgcagagatcgagcaaggcctcgaactcgtgcaggttagcgccgacacccgcagcctgctcgcacctgactggcagacagcccagcagaagctcaccggcatgcgcttgcatcatttcggtgcgttctacaagaggtcatggcgagccaatgactggatgtggggccgactcgacggagcgggatggctcgtccacgtgctgctagacccgcgccgggtgcgctggatcgtcggggagcgcgccgataccaacgggccgcagagcggtgcacaatggttcctaggcaaactcaaag

SEQ ID NO: 2150 - DNA, 402 bp, Mycobacterium tuberculosis H37Rv
agcggatattgctgggtggcgaagcggcggttgcggctgatgcgggtgttgagtatgcagtgcggcgcttgcaccgagccgacgaggttgcggtactcgtgatcactgcgcagctgggcgttgaccagcgccttggtgagctcgaacgtcgatcgtcccgcaccggccaccgaacctaagacgctaccgaccccgctgaccagcccgcccaacccccgcaccacgtcgcccaggccatcgagcacgttaccggccccagctatcaaaccgccgccgacggagtcttgagtgtcggcgggtgatcggccaggtgtgggaatgttgaagaacaacgggtgggtggtgtcgtgcgggtcggtggacaggctgcgggccagcattttctggccggtatagccgtct

SEQ ID NO: 2151 - DNA, 480 bp, Mycobacterium tuberculosis H37Rv
ccggcggcaccggcggcaaaggcggccaaggcggcgacggcggcaccggaggggccggcggcgcaggcccagtgctgttcggccacggcggcgccggcggcatgggcggccaaggcggcaccggtggaatgggcggcgccggcggagacggcaccaccgtcatcgcggccggtaccgggggggagggcggcaccggcggcgcggccggcgccggcggagccgcaggcgctcgcggggctctcaccagcggcggcctagccggcggcgtcggggccggcggcaccggcggcaccggcggtaccggcggcaacggcgctgacgccgctgctgtggtgggcttcggcgcgaacggcgaccctggcttcgctggcggcaaaggcggtaacggcggaataggtggggccgcggtgacaggcggggtcgccggcgacggcggcaccggcggcaaaggtggcaccggcggtgccggcggcgccggca

SEQ ID NO: 2152 - DNA, 440 bp, Mycobacterium tuberculosis H37Rv
ggccatgccggcaacacaggtgacggcggcgacggcgggaccggcggtaacggcggcaacggcaccggaggcgtgaacggcgccgacaacaccctcaaccccgacacccccggcggcgccggggagcccggcggggccggcggggccggcggggccggcggggccgccggcggcccgggcggtaccggcggtaccggcggtaacggcggcaacggcggcaacggcggcaacggcggcaacggcggcaacggcggcaacggcggcaatgccggcaacaacagcaccaatgccccagtcggtggcgaaggcggcgccggcggcgacggcggcgccggcggcgcaggcggggccgccaacggcggcaccgcgggcagccagggcactgggggcgtcggcggcgacggcggcgcgggcggcaacggcggcggcggcaaggctgg

SEQ ID NO: 2153 - DNA, 400 bp, Mycobacterium tuberculosis H37Rv
ggggccgccggcgccaatggcggaaccggcggcagcggtggtaatggcggtgacggcggtgcgggaggcattggcggggccggcggcaacggcataccgggcactggcacagagcctgccgggggcaccggcgccaaaggtggagacggcggcgacggtggcgccggcggcgcaggcggcaatgccggcggggccggcggccagggcggcaatgccggccagggtggcgccggcggtgcgggcggcaacgccgtgattcccggcgacggcgtcgggaaggcgccgcacggcgacgcgggcggcagcggcggagacggcggcaaaggcggccagggcggtagtggcggcaccggcggatccggtgccccgatcggtggcggcgccggaggcaccggagggt

SEQ ID NO: 2154 - DNA, 400 bp, Mycobacterium tuberculosis H37Rv
ggcggagacggcggcaaaggcggccagggcggtagtggcggcaccggcggatccggtgccccgatcggtggcggcgccggaggcaccggagggtccggcggacacgccggcaagggtggcgccggcggcatcggcgcacagggcaccaccatcaccgtgcccgggaacggcggcaacgccggcgacggcggcaacggcggcaacgccggcgccggtggaaacggcggctccggcgacttcggtggcaataccaccagcggcgcctccggcagcggcggcaacggcggcaacgccggcaccgcgggtagcggcggtgcgggcggaaccggcggcaccggccttagcggcggcaacggtggcaacggcggcaacggcggcaacggcggtgacggcggtaacg

SEQ ID NO: 2155 - DNA, 418 bp, Mycobacterium tuberculosis H37Rv
gtgcccgggaacggcggcaacgccggcgacggcggcaacggcggcaacgccggcgccggtggaaacggcggctccggcgacttcggtggcaataccaccagcggcgcctccggcagcggcggcaacggcggcaacgccggcaccgcgggtagcggcggtgcgggcggaaccggcggcaccggccttagcggcggcaacggtggcaacggcggcaacggcggcaacggcggtgacggcggtaacggcgcccacggcaccgtcggcgcccagttcgtcccggccaccagcttgcccacacccaacggcggggccggtggcaacggtggcaccggaagcaacggcggcgcgcccggccccgccggggcgcccggccccactaccggcggtaacgctggcagccagggcatcggcggcgacg

SEQ ID NO: 2156 - DNA, 400 bp, Mycobacterium tuberculosis H37Rv
gccggcggcgccggtgggtggctgttcggggttggcggcgccggcggtgtcggtggggccggtggcggcaccggcggggcgggcgggcccggtggtttgatctggggcggcggcggggccggcggtgtcggtggggccggtggcggcaccggcggggccggcggccgcgccgagctgctgttcggcgccggcggtgcgggtggggcgggcaccgacggcgggcccggtgctaccggcgggaccggcggacacggcggagtcggcggcgacggcggatggctggcacccggcggggccggcggggccggcgggcaaggcggggcaggtggtgccggcagcgatggtggcgcgttgggtggtaccggcgggacgggcggtaccggcggcgccggtggcgccg

SEQ ID NO: 2157 - DNA, 558 bp, Mycobacterium tuberculosis H37Rv
ggcggcctcggcggcgccggcggacaaggcggcaccggcggggccggcggagatggcgttctggggggtgtcggtggcactggtggtaagggcggtgtcggcggcgtggctggcctcggcggggccggtggtgccgcgggccagctcttcagcgccggaggcgcggcgggtgccgttggggttggcggcaccggcggccagggtggggctggcggtgccggagcggccggcgccgacgcccccgccagcacaggtctaaccggtggtaccgggttcgctggcggggccggcggcgtcggcggccagggcggcaacgccattgccggcggcatcaacggctccggtggtgccggcggcaccggcggccaaggcggcgccggcggcatgggtggctccggtgctgataatgccagcgggattggcgccgacggcggcgcgggtgggactggcggtaacgccggcgccggcggggccggcggggccgccggcaccggaggaaccggcggggttgtcggcgccgcgggcaaggccggtatcggcggcaccggcggccaaggc

SEQ ID NO: 2158 - DNA, 400 bp, Mycobacterium tuberculosis H37Rv
ggcggcaccgggttttccggtggagccggcggggccggcggggccggcggcaacaccggggttggcggcaccaacggctccggcgggcaaggcggcaccggcggcgcgggcggcgccggtggtgctggcggtgtcggcgccgacaaccccaccggcatcggcggcaccggcggcaccggcgggaaaggcggcgccggcggggccggcgggcagggcggtagcagcggtgccggcggcaccaacggctctggtggcgctggcggcaccggcggacaaggcggcgccgggggcgctggcggggccggcgccgataaccccaccggcatcggcggcgccggcggcaccggcggcaccggcggagcggccggagccggcggggccggtggcgccatcggtaccg

SEQ ID NO: 2159 - DNA, 448 bp, Mycobacterium tuberculosis H37Rv
gccaaggcggggccggcggcagcgccggcgccggcggcatcaacggggccggcggggccggcggcaccggcggggccggtggtgacggcgccccggcgaccctgatcggcggacccgacggcggtgacggcggccaaggcggcatcggcggggacggcggcaacgccggattcggcgccggtgttcccggcgacggcggggacggcggcaacgccggattcggcgccggtgttcccggcgacggcgggatcggcggcaccggcggggccgggggcgccggcggcgccggcgccgacggggaccccagcattgacggcggccaaggtggtgccggcggccacggcggccaaggcggcaaaggcggcctgaacagcaccgggctagccagcgccgccagcggtgacggcggcaacggcggggccggcggggccggcggcaacggcggcga

SEQ ID NO: 2160 - DNA, 400 bp, Mycobacterium tuberculosis H37Rv
ggcaacggcggcagcggcggcaacggcggcaacgccggcatgggcggcaacagcggcaccggcagcggcgacggcggtgccggcgggaacggcggcgcggcgggcacgggcggcaccggcggcgacggcggcctcaccggtactggcggcaccggcggcagcggtggcaccggcggtgacggcggtaacggcggcaacggagcagataacaccgcaaacatgactgcgcaggcgggcggtgacggtggcaacggcggcgacggtggcttcggcggcggggccggggccggcggcggtggcttgaccgctggcgccaacggcaccggcgggcaaggcggcgccggcggcgatggcggcaacggggccatcggcggccacggcccactcactgacgaccccg

SEQ ID NO: 2161 - DNA, 400 bp, Mycobacterium tuberculosis H37Rv
accgctggcgccaacggcaccggcgggcaaggcggcgccggcggcgatggcggcaacggggccatcggcggccacggcccactcactgacgaccccggcggcaacgggggcaccggcggcaacggcggcaccggcggcaccggcggcgcgggcatcggcagccttggcggcggcactggcggcgatggcggcaacggcggcaacggcggtaccggcggcgagggcggcgaggtcggcggcgccggcggcaccggcggtgcggccggcaatggcggcgatggcggcaccggcggcaccggcggcggggacgggggcgccggcggcaccggcggcaccggcggcaccggcggcctcggcgacccccgggtcggcggatccggcggcgacggcggcaccggcg

SEQ ID NO: 2162 - DNA, 981 bp, Mycobacterium tuberculosis H37Rv
gagcggccggagccggcggggccggcggagcggccggcaccggaggcaccggcggcatgatcggcaccacaggcaacgccggtgtcggcggggccggcggccaaggcggtgacggcggagccggcggggccggcgccgacgccgaccagcccggcgccaccggcggcaccgggttcgccggtggagccggcggggccggcaaggccggcggtagcagcagtgccggcggcaccaacagctccggcagcgccggcggcaccggcagacaaagcggcaccgggggtgctggcggggccggcgccgataaccccaccggcatcggcggcaccggcggtgacggcggcaccggcggagcggccggagccggcggggccggcggagcggccggcaccggaggcaccggcggcatgatcggcaccacaggcaacgccggtgtcggcggggccggcggtagcagcggtgccggcggcaccaacggctccggcggcgccggcggcaccgacggacaaggcggcgccgggggtgctggcggggccggcgccgataaccccaccggcatcggcggcaccggcggtgacggcggcaccggcggagcggccggagccggcggggccggcggagcggccggcaccggaggcaccggcggcatgatcggcaccacaggcaacgccggtgtcggcggggccggcggccaaggcggtgacggcggagccggcggggccggcgccgacgccgaccagcccggcgccaccggcggcaccgggttcgccggtggagccggcggggccggcgggtccggcggtagcagctgtgccggcggcaccaacggctccggcggcgccggcggcacctgcggacaagtcgtcgccgggggtgctggcatcagcttcagcaacggcagcaacggcggcaccggcggcaccgggggcgtgggcggcaccgggggcgacggcggcaacgcaggcaccggcgccggcgacc

SEQ ID NO: 2163 - DNA, 401 bp, Mycobacterium tuberculosis H37Rv
agcaacgacgggtcgcgctgcagcaggtcccactggtcacggttgcgcagcagctgctcggtaccaccgctcaaggtatgccgcgtggtctcgtcgccgccgatcaggatcagcagcgtctccatgaccagctcgtcgtcgcttagccgctcgccgtcaacttcggaactcaccagcacgctgaccaggtcgtcggtggggtccgctcgccgtgccgcaatggtggcccgggtgaagtcgttgtaggccgcgaaggcgtccatggtgatctggaaatcctcttgagacacatgcgaactgaggaatgtcaccagatcgtcggaccaccgcaagaacatgtcccgctgctctggacgcaccccgagcatgtcgccgatcaccgccatcggtagcggcgcggc

SEQ ID NO: 2164 - DNA, 401 bp, Mycobacterium tuberculosis H37Rv
ggaccatcgcctgcaagacaaagccgtcgacgcggtcctcgagccgataaggttcgtgcgttgtcggctggacggcgccggtttcgaggcgaagcggtgaggtcggtgtttggccgccgaatccgacgtcgacgagatagcatccgcccgagccggggaacgtgacccccagcagggtgtgcgtctgcggcggcaggggccgcgtccggcgcgagcttccagacgacgcgggcggcgaatcggcgcacccgatagccgagttcggccagcacataacccatcagcccgttgtgctcaaagcagtacccgcctcggcgccgaagtaccagcttgtcggccagcgcctgtggactgaggtcgtcgaccggcacccccagcagcgggtcgaggttctcgaacgg

SEQ ID NO: 2165 - DNA, 400 bp, Mycobacterium tuberculosis H37Rv
ggcggggcgtgctgcgccggcacaacgtcgacgccagcgtcggcgagtacacccgactgggactgtgcaccgtgcctgcggccctggcgatggcggtgctcgcgctgtgggccagcgcccaggttctggggatctagccgcaagggcgcgagcagacgcagaatcgcatgatttgagctcaaatcatgcgattctgcgtctgctcgcgaggctcgcgtggccgccggcgctggcgggcgatctcggcgagcaccaccccagcggccaccgaggcgttcagtgattcggcctgagcggccatcgggatggacaccacctcgtcacagttctgccttaccaaccgggacaaccccttgccttccgacccaacgaccaccaccaacgagtcagtgccatctac

SEQ ID NO: 2166 - DNA, 401 bp, Mycobacterium tuberculosis H37Rv
tcggcgttttcagcgggaactcgtactgtcaggtcgccctgcgcaactttcaagacgagatactctttttgttcccctttgatggtccgggtttcgatcgcctcgactaacgcagcaccgtggtgtggatagacaacggtgtctccgaccttgaaaatcatctgatttgagcccctttcgttactccatgctaacacggggccctaacgggcgccgaacaacggtgcaggtcaggggcatagcgcgggaagattgggggttgacagacgggcctagaagtgcatcgccgaatctgggacgcccctgagaacggggtgcccgggctaccgcgccggtccggtcgacgccgcggtccccaccgctaccgtcggcggcacctaactactactgtgcatagtcga

SEQ ID NO: 2167 - DNA, 400 bp, Mycobacterium tuberculosis H37Rv
gttacccccgtcaccagcgtcacccccaacgcctggttgcccggcgccgcccattccgccctgaccgccggtgccgccccgggcgccgatgccgccttcgccccctgtgcccccgatgccacctgcgccgccgtcgccgaccaggagcccaccccgaccgccagagccgccggccccgccggtccccccggtgccgccggtcccgccggtcccgccaacggacaggccagtaccgccagtgccaccggtgccaccggtttgcccgaactcggtgcctggctggccgggtccgcccggttcaccgttgttacccatgctgccctggcccgccgggacggtcagggggttgaccccggcggcacccgccgcgccggccgcgccgagccccccggccccaccg

SEQ ID NO: 2168 - DNA, 401 bp, Mycobacterium tuberculosis H37Rv
atgccgccttcgccccctgtgcccccgatgccacctgcgccgccgtcgccgaccaggagcccaccccgaccgccagagccgccggccccgccggtccccccggtgccgccggtcccgccggtcccgccaacggacaggccagtaccgccagtgccaccggtgccaccggtttgcccgaactcggtgcctggctggccgggtccgcccggttcaccgttgttacccatgctgccctggcccgccgggacggtcagggggttgaccccggcggcacccgccgcgccggccgcgccgagccccccggccccaccgttgccgaatagccacgcgttgccgccggcaccaccggcgccgccgttgccgccggggatagtcgccgccccgccgttgccgcccgcgcc

SEQ ID NO: 2169 - DNA, 501 bp, Mycobacterium tuberculosis H37Rv
aaccccgcgcctggcgacaatgcggcccgcaaaacgggccgaggaggagccaggcaatcaccccagagccgggtgcagcgggtcgccaccatcagccccgtggcgatcgcaaaccccgcgcctggcgacaatgcggcccgcaaaacgggccgaggaggagccaggcaatcaccccagagccgggtgcagcgggtcgccaccatcagccccgtggcgatcgcaaaccccgcgcctggcgacaatgcggcccgcaaaacgggccgaggaggagccaggcaatcaccccagagccgggtgcagcgggtcgccactggctagaccaacgaccggtagttcccgacggcgtcggaaaatccgacagctgagcgttcgggtcaaacacgcggtgcaccggacctgatttggctcgaattggtgcgcaccgagggtcgggcacatcgctccggtcgcatgtgtcactgcaccgggcgacacccgatctgcccagctctcagcgacagc

SEQ ID NO: 2170 - DNA, 400 bp, Mycobacterium tuberculosis H37Rv
ccccttggttgggtattccaatccccagaaggtcgtacaagccgtcaatggcactgatcgttggatcgatgatgaacgctctgctcatgcctgccgcctatctcaacggtcgtcgattccatgcatagccttggttctgcattgcacgcgtagggcctacagtctggctgtcatgcttggccgatgtcaacagtttttttcatgctaagcagatcgtcagttttgagttcgtgaagacggcatgttcacttgttgtcgactacatcgtctgcgcacatttgccctcctgcaactgcgctgcgacaatgcgccaaccgccgtgtaggcggcgcgatcccaaggcagtgtctccgacgtcgatgcctgcgcttcgccttcgatcggtatgagatctgttgca

SEQ ID NO: 2171 - DNA, 400 bp, Mycobacterium tuberculosis H37Rv
ggccggtgcggccggggcgggcgggaacggcggggccggcgggctgctgttcggtaccgccggggccggcggcaacggcgggttaagcctcggtttgggcgtcgccggcggcgccggcggcgccggcgggtcgggcggtagtgacaccgccggacacggggggaccggtggtgccggcggcctgctattcggcgccggcgaggacggcacaacgcccggtggcaacggtggggcgggcggtgtcgccgggctgttcggcgacggcggcaacggtggtaacgccggagttggcacgcccgcgggcaacgtcggcgccggcggcaccggcggcctgctgctcggccaggacggcatgaccgggttgacgtagccgcgtggcggggccgcgccttgcttccgg

SEQ ID NO: 2172 - DNA, 416 bp, Mycobacterium tuberculosis H37Rv
tggtaacgccggagttggcacgcccgcgggcaacgtcggcgccggcggcaccggcggcctgctgctcggccaggacggcatgaccgggttgacgtagccgcgtggcggggccgcgccttgcttccgggactaccacccgcaggtcgctggccgtagttggttctccccgctagcccaccactagcttcgcttgccgatagcttcgcttgccgatagaactagatcgtcgtcaacccggtgtcgtgggcaccttggccggccccgcccgcgcggtggcggtcgccacacccgcgaacgcgacagccacctcgacggtgacgaccacgtcgaggtccaccaccctgcactgcgcgtgctcgacgcgcatcgcacgggccaccagcgtcgcacgcgcgcaggccgccgccagtccggac

SEQ ID NO: 2173 - DNA, 401 bp, Mycobacterium tuberculosis H37Rv
cgggccaccagcgtcgcacgcgcgcaggccgccgccagtccggacggcagccgggcggcagcggctaacgaagccagatcagccgccgcctgtgcgcggtgacgagccaccaccgccgaccctagatatgcacccgcaccggtgacgcacagcagcaccgcgaccatcgcgacggcaagcacggtggccgagccgcggtcgaccccggctcggccaccgaaattgccctagcagcaatgtccaacgtaggcaacaggtttgagtgtgctgtgacagtggcgaccacaaactcgccgtcccggtgcacctggaccagcgccgcacgcggggcgatgctgcgggcgacgtcggtcgccgagcgtacgtcaccgcgcgcggccaatcgagcggcctcgcgggcc

SEQ ID NO: 2174 - DNA, 400 bp, Mycobacterium tuberculosis H37Rv
gtcacccacccaccgtgcggggtccatggtgtgggacaccagtcccaaaggcgcaattggggacagacgtgcaactgtgcacaaacgcccctgagggggtccgggcaacacgattcccgcaacgcccagaaagctgggctaagcaccgggctgacgacgtttgcgtggctgccaaaagggacgacccccgccagggggggaggaggcgagggtcgtcgtgcatcagccccggggggtcggactgatacaccctcggctatggccgagtaatgcttactatacacatgacagtgcgcagtcacgcaagtaccggacgcaatggaaagcacagcttgagccgtgtaaatgctcttgacttctcgacaacatcggtagtcaattgacctgttcgggaacaagg

SEQ ID NO: 2175 - DNA, 400 bp, Mycobacterium tuberculosis H37Rv
gatcggcacctcaccgccgacaggcccggtcgccagcgtgacaccgtaaggctccgacggcgccgacgatgcgatctcgggcagcatggcccgaggtatcgaaaacaacgacaacagctcgtcgtcccagtccagcgtctctagatccatcaacatggtccggctggcgttggttacatcggtgacatgcacacccccccgcggcccgccggtcagattccacaacacccaggtgtccggtgtgccgaacaatgcgtcgccgttctcggcggccgcgcggactccatcgacattttccaggatccactgcagcttgccgccagagaaataagttgccggcggcaggcccgccttgcggcggatcaggtttccacgaccgtctcgatccagcgccgacgcg

SEQ ID NO: 2176 - DNA, 400 bp, Mycobacterium tuberculosis H37Rv
cgtggccgtgctggactactacgagcacgcgatgagcgccggcgacgacgctcaggccgccgcgtatgtggaggcctccgtgacgatcgcgagcccggcgcagccgggcgaagcgggtcggcacgcatcggaccccgtgacgatcgcgagcccggcgcagccgggcgaagcgggtcggcacgcatcggaccccgtgacgagtaagacggtgtggggtgtcggtatcgcaccgtcaatcaccaccgcgtcgctgcgcgccgtggtgtcggcggtcaaccgggcggcacgctaggacggcgctgaactagggtcggggtccgcggcatgatttttcgcagtgacgttccgctcgccgtttcagaacaacgctaactgcttttcgacgggagcgacgtcggtg

SEQ ID NO: 2177 - DNA, 440 bp, Mycobacterium tuberculosis H37Rv
ccgtccccaggtgtggctcacaagacgaggatgacacgtccgagcgacatcacctggtcgctacgcatcgtgtcggcccgtaaaacccggacgcgggcgacccgccgcacccggcgacaagcgccgagcttgcgatcgccctgaatccaacgcgggcgacccgccgcacccggcgacaagcgccgagcttgcgatcgccctgaatccaacgcgggcgacccgccgcacccggcgacaagcgccgagcttgcgatcgcccgtaaactgcccgggtggtaaccacccgggcacgcctggccctagccgccggcgcgggcgcacgctgggcgtcgcgggtcaccggtcgcggcgccggagcgatgatcggcggtctggtcgccatgaccctggaccgctcgatcctgcgccaactcgggatgggccggcgcaccgtcgtcgtc

SEQ ID NO: 2178 - DNA, 401 bp, Mycobacterium tuberculosis H37Rv
ggatgtcatcagatgggctcgccggcttgcggtggtggcgggcacagcagcggcagtgaccactcctgggctactgagtgcgcacgttccgatggtctccgccgaaccgtgtcccgacgtcgaggtggtgtttgcccgtggcaccggggagccacctggtattggcagcgtcggaggactgttcgtcgacgcactgcgtttcccaggttggcgccaagtcactcggggtctacgccgttaactaccccgccagtaacgactttgccagcagcgacttccctaagacggtcatcgacggaattcgcgacgcgggctctcatatccagtcaatggcgatgagctgtccccagaccaggcaagtgctcggtggatactcccaaggtgcggccgtggccggttat

SEQ ID NO: 2179 - DNA, 400 bp, Mycobacterium tuberculosis H37Rv
attcggtgaagccggggagggtgtccggtccgcattgtggatgcatgtcattcccgggcgcggcgcggcgtggttgatcgtcgacgtccgagatgtggcggcactgcacgcggcgttgttggaatccgggcgtgggccgcgccgctacactgcgggaggtcatcggattccggtgcccgagctcgcgaaaattctgggcgggtcgccggcaccacgatgctggccgtcccggtgcccgattccgcgctgcgtgtcgcgggatcggtgctggatcaagccgggccctatctgcctttcaatactccgttcaccgcggcaggtatgcagtactacacacagatgccggagtccgacgattcgccgagcgaaaaagaactaggcatcacctaccgcgatccgc

SEQ ID NO: 2180 - DNA, 400 bp, Mycobacterium tuberculosis H37Rv
tcgaggcgcccgaagcggccgttgccgagttccccggattcgcattcttcgaaatccaactgcgcctgccggttaacggccgttgggtgctggtggtgactggcggcaccggagcgatatcgcttccggtgctggtgagcgacatgcctgcgacgataggtttttgacgcgccggtcttgagcgacgacccccggggcttgcagaaaggttgtcccgtgcaccagcagcatccctacaacgcagctggattcggctgaccgtgctgacacccaacccagcggtaggttcggcagcgtgatagtcggggccttcctcgccgaagcggcctcggtggtggacaacaagctcaatgtctccggcggcgtgctgtaccgatttgcggtggatccggaccggtcg

SEQ ID NO: 2181 - DNA, 401 bp, Mycobacterium tuberculosis H37Rv
gcggcttcttgggtggttagtttgaggtggcgtggcaccaatgaaatgcctttgccttgcgacaaggccagcacgacgttgtacagcgcatctctgactggttcaggaagcgtcatcggttgtccggcgttgccacacacggaaacttcaggcgcgccaagcacctccagcaaggaggtcatgtcctgcgggtcgcgggggtggaagtactgtccgttcctggactgcggctgtcatgcagcttagcgtaattcgaacaaaacgaaacgtcgagtctctgaccaggcatttacgcaagctactgcgccgctaaccgcgccgggtcgcgcacttggccgcctcaaacgccgcctagcacggtgacgtcgagcccggcggagcgcaccagctgatcagagctg

SEQ ID NO: 2182 - DNA, 400 bp, Mycobacterium tuberculosis H37Rv
gcaaccttggccgacatcgagccgggacccagcgatacgtctccttccagaccgtgacggtgccaggcgtccagggccgaacgggcggcgccgctcaccaggcgctccacagagtcaatgtccgcacgcagtgagaattccgcgccgaccatgccgccgaggaccatgattgagttgagcaaatgctcggttagttttttcacgtcgtaccccgggcacggtgtctgcttggccttgtcctggcggccgatggtgtgcagcacttgctgcagcacctgcagcgcggcttccgcgcacgccagctcgtcggtcggtggggaatctggtccgggtcgcgattcaggcggcatactggccacgctacggtctgggcatgggcgaaacctacgaatccgtcacc

SEQ ID NO: 2183 - DNA, 400 bp, Mycobacterium tuberculosis H37Rv
agtacgaaggggtcgcgttaaccgagcgcggctccgactacgccggatcgctgcctgatgccatcacgatctaccgcgaggcgctgctggacgcctgcgactctgaggatgaggtcgtcgaccaggtcgccatcacggtgatccatgaggtcgcccatcacttcggcatcgacgacgagcgcttggaccaactgggctggcgtgacgaaccagcgcccgggcgcggcaacccggatttgtcggcacccgatgctatgaacggcccatgagcacggactgccgcgactgccgggcgggcttggatcactgccacggcaccgtcattcgtcatcccttggcacggccggaatgcaccgagccggactgtgtcagccccgagctgcaaccccatatcttcgtc

SEQ ID NO: 2184 - DNA, 669 bp, Mycobacterium tuberculosis H37Rv
cgctcatctactcaaagaaggcctacggcacctgttttcggtcaaaggcgaagagagtaagcaggcactggaccggttgatcttctaggcgcggccccgagtgagcatactttggtggcttgtatctcttgtagtgccgctttgacggggtggtggtcaggtacggtggcctcgggagaggctggagggctcgacgttttcggctgagtgtctgggcccgtgaaagagatcgtctgctccagctttgtctcctgaactgacccggtttagggaattggtggccaggttgcggaagtgcgcagcatcgacgtgtacctgggtgaggcatcgaatcatcgacaagcaccggagccgcgcgtgaactcccgccgcgttgtggtcggggatgatgtgggagaccggccggcagtgctgtgtacgaaggttctcccaccgcaacgagttcacgcacgacggtcggctgggtgggccctggaatacgtgaactcttcatcaacacaacatgattgacgatgaaggggagaacctccatgcacaacaacgctaacccgtgactgccgagaatccaggacggagcaggcggacgctggtcggaatcgacgcggcgatcacggcctgtcaccacatcgcgatccgcgatgatgtcggtgcgaggtcgattcgattcag

SEQ ID NO: 2185 - DNA, 401 bp, Mycobacterium tuberculosis H37Rv
cgtccaacgatcgggatcttgcgtgcaaacgccgagcgggacctcatacagggcggttactgtcatgtctacgttcctccagaaagcgttgcaggttgtagcctctgccgcgaaagcgtatcgcattaaccatagcgatgcaacagtttcctcctctgcctgcctagcggtgctgcggctccggttcggcgagctccgagctctagtgcgcgcaccgccgagtaccagggcatagatcctgttaatcagctgtgtatctggcctcgccggcgcgtatccgaccccttcgggcagatcttccaggaaaagtgttctgacatgcgacagttcaggtgtgaagtgaactgtagcggcagttcggtttggctaggaaactatttccatagcgggccgtcgcgtcg

SEQ ID NO: 2186 - DNA, 400 bp, Mycobacterium tuberculosis H37Rv
accttgccaaagttccccggcctgcccgggttgcccagcctgcccgacatcatcgacggcctctggccgccgaagttgcccgacattccgatccccggcctgcccgacatcccgggcctacccgacttcaaatggccgcccacccccggcagcccgttgttccccgacctcccgtcgttcccagggttccccgggttcccggagttccccgccatccccgggttccccgcactgcccgggttgcccagcattcccaacttgttccccggcttgccgggtctgggcgacctgctgcccggcgtaggcgatttgggcaagttacccacctggactgagctggccgctttgcctgacttcttgggcggcttcgccggcctgcccagcttgggttttggcaatc

SEQ ID NO: 2187 - DNA, 400 bp, Mycobacterium tuberculosis H37Rv
cagctttgccagtttgcccaccgtgggtcaggtgaccgccaccatgggtcagctgcaacagctcgtggcggccggcggtggccccagccaactggccagcatgggcagccaacaagcgcaactgatctcgtcgcaggcccagcaaggaggccagcagcacgccaccctcgtgagcgacaagaaggaagacgaggaaggcgtggccgaggcggagcgtgcacccatcgacgctggcaccgcggccagccaacgggggcaggaggggaccgtcctttgatcggacaccgagtcgccagcaggtctgtgccatagcgagtcgaagccatagcgagtagaaagttaaacgtagaggagggttcaacccatgaccggatttctcggtgtcgtgccttcgttcctg

SEQ ID NO: 2188 - DNA, 400 bp, Mycobacterium tuberculosis H37Rv
gtggccggggcgaccgggggggtgaccggcgtgatcggggttggctcgcctggtgtgcccggtttgaccggggtcaccggggtgaccggcttgcccggggtcaccggcgtgacgggagtgccgggcgttggtgtgatcggagttaccggcgctcccgggatgggtgtgattggggttcccggggtgatcggggttcccggggtgatcggggttcccggtgtgcccggtgtgcccggggatggcacgaccagggtaggcacgtctgggggtggcggcgacttctgctgaagcaaatcctcgagtgcgttcttcggaggtttccaattcttggattccagcacccgctcagcggtctcggcgaccagactgacattggccccatgcgtcgccgtgaccaatg

SEQ ID NO: 2189 - DNA, 400 bp, Mycobacterium tuberculosis H37Rv
ggggtgaccggcgtgatcggggttggctcgcctggtgtgcccggtttgaccggggtcaccggggtgaccggcttgcccggggtcaccggcgtgacgggagtgccgggcgttggtgtgatcggagttaccggcgctcccgggatgggtgtgattggggttcccggggtgatcggggttcccggggtgatcggggttcccggtgtgcccggtgtgcccggggatggcacgaccagggtaggcacgtctgggggtggcggcgacttctgctgaagcaaatcctcgagtgcgttcttcggaggtttccaattcttggattccagcacccgctcagcggtctcggcgaccagactgacattggccccatgcgtcgccgtgaccaatgaattgatggcggtatggc

SEQ ID NO: 2190 - DNA, 401 bp, Mycobacterium tuberculosis H37Rv
cacgtcgcccgacagcgctgcggcttcccgcccagccgacgtcagctgcgccgccgtgtcagccgggaggccaccacccggcgatccggtaggcggaaccatcggtgcggctggcatcccggtaccgggagtcacaccggagccgtcagacggcggcatcaggaagccagggatcaatccctgctcttgcggaggcgggggcgggtcgatcttgatggcggggggaggcttcggcgggtttaccggttccagggctgccttgttgttgtattcggtcagcaccttctccgacctctgctgatactccgcgtacaccgggagaatttggtcgcgggccgaagggttttccgcgtaaagccgttcgagcccgactatgtcttcataagtcggatgttcccgcc

SEQ ID NO: 2191 - DNA, 400 bp, Mycobacterium tuberculosis H37Rv
tcccgcccagccgacgtcagctgcgccgccgtgtcagccgggaggccaccacccggcgatccggtaggcggaaccatcggtgcggctggcatcccggtaccgggagtcacaccggagccgtcagacggcggcatcaggaagccagggatcaatccctgctcttgcggaggcgggggcgggtcgatcttgatggcggggggaggcttcggcgggtttaccggttccagggctgccttgttgttgtattcggtcagcaccttctccgacctctgctgatactccgcgtacaccgggagaatttggtcgcgggccgaagggttttccgcgtaaagccgttcgagcccgactatgtcttcataagtcggatgttcccgcctagcccacacgtgcagctgcgcga

SEQ ID NO: 2192 - DNA, 2796 bp, Mycobacterium tuberculosis H37Rv
gcagccctaccagcacgcaaatcgccagcacctgcatcgaaaccggcctaaacattcggacggcggcgacagcggcaaggatcccgcacaccgttaccaccgcggtgaccactgcggtctgccaccgcttgcgggtcgccacgccgatcgtgatcgcacccagaaccaccaccacgagcccgatcagcgcatgagccgccccgagcgcgcccggcggcgcgcacgcggcggccacggcaagcaacaccaccgccagccacccgaacccactgaacaggtcacggcgctcccgccaaccccaccacaccaccaatgccccgatcaccaggagcacaccaatcccgccagccatcgcagctgggaccgggctgtcggtgattgtgcgtgtccgcaacgtcagggccagcaccactccgaccgccatggcgataatcgccatggcggtgtgggcggcagtcagcgaggttaccggcgcaaacatccgatccccgccgtcacgccccagccacttgcccatggccgccagcccggtggatagcgattcgtactgtggctcaaacgactcgccagcaacccggggtactagcaccagcgtgtcaccgtcttgaacgcccagctcgtcgaggctcttgttgatgtccagccgcaccccgttgatcttgtgtagctcatagctacccgccggcagcgcaaccccgtcgaaacctttgcgcttcagatcggcatcgaacaactccaccattccttcgaagaatccctctactggaattccggcggggaatacctgggagcatagatgcttgtcgtagcaaatgttgaccgcacaacgtgccgggaaagcaaccttatgcggcgcagtcactgcgccgcccgttcggcatccggaacgtatttgtcggccaatccggcggtgatttcgaaaagccgcaaccgcgacttcttatttaattcatgcaccgtatcaatgatcccgcctttggccaggtgcggatcgaacggcattgcttccacgattgcaccgaccttggtaaaacgttcggtcaggtaggccagcgcatccttgtcggtaatgctgtcggtgtggttgaggatcacggtgctgcgcgagaccagctcgtgataaccctgcgccctgaggtagtccaccgcccgcagcaccggccgggaccggtccgcggtgattcccgagacgaacaccagggtgtcggtgctctgcagcactgccttcatcacgtcgtgctctaggtcgggcgaggtgtcgatgacaatgacggtatgagttcgccgcagccgagacaacactgcggagaacatcgccgggacgagcggcctgggctggtctgatgtccgatttccggccagtacgtcgagcccgaccgtgttttgccccaggtgttcgcgaatgtctgcgtagccctggacatcggtgtcgttgataatggcggcgtaatcccccggcggcgactcgtcgatgcggtcggccagggtaccgaaactcggaaccgcgtcgatcgcaatcacgttctccgggcggcattcccgaaacacgccgccgatgcacgcggccatcgtggtgacccccacgccgcccttgccggacacaaccgtgatgacatattgccgacggatatgccgacggatacgtccctgtaaattgcggtagtgccgttcccggggcgattcacctggattaattttgtgaaatgaaacggaatagacgaatttccgccaaccggttcccgggggaatctttctaggggcagccagatcggtaatacgcatggtgtcggataccgaatcccgaaagtgatgccgcaccgacggatcgccgcgtccgatcgcgccgtcgtctaacatattcgggtcattccacgggttcgtcacgaccgcgatgctaacatgattcgagattccttgtttactgcgcgtgagcggctctttgagtgcattagtttgctattcgccagacaatgtcattcacaccacacgccggtatgagtaccattcgtcaccagcgggcaagcggcggatgagccgttgcaccgccccaccgatatcagagcgcgatccaggcgagaggacctggtaacgtcgctgtcccgaggtcacgctttcgacgcagatgcgcccggcggcagtgtccacgatggccaccgttgaatcgccgaccaggatgcgcgccgacttttccggcccgacgcctgcctgcagcgccaccagggtggcgtgcgcggagcgtgtgggatcggcggccatggttaccatctgtagctggtcgacgtccaggcgctgactgagcagatacgaccgcaaggtgccggcgtcgcgtacggcgtgtagtagttcgtcggcgtcgacggtgaccggccgtagcggggcggcctcagcgacaccgcacaaccgctcgacctgacccaccacgagttcgccggccccggcctcgtcactggcggtgccggccgggtagagccgcaccaggttgccgtggcgttccaagaccacccaccaggtggcaaatcggcaaatggccgcgcgcgtcggttcgccgcccggcaccccgatcgttaccagtaaccccaggtcgcgtcgcaacagcacggtcagccattcacggaccatggggtcggcattaccggcctggtccagagcccccaccgccatcaactcggcggccaccgggtggcgaagtgcccgctcggcggtgtccaaccgcggcaacaatggccgtaatcccagttccggacaggtttgttccaccccggttaccgcttgtagtacccacaggccatcgaccgt

SEQ ID NO: 2193 - DNA, 401 bp, Mycobacterium tuberculosis H37Rv
gctagcagcaagcagaaggtggggcagacgcgcggtccgcgcatgtaccccaccttcactcggcccacggccggctttagaacaagcccgcgatggcctggtcggttccgatcgcgttgtccagcacgtggccggtggtagtcccatgctgacccaccgtctcaatgagcccctgcagccccgacagcatctgcgcctgggcgtcgaaaaacccttgcgcgccgtggcccgcgaaaaactcttgcagcgcatttgttttgctggcggtgtcttcgtaaatcatgtggagctggccggcgcgcgagcccacgtcggaagcgaagtcggatacggctcccgggttatacgtgatttgatctgacatgtgaaattcctttccgaggcgtgaaacgagttgggtc

SEQ ID NO: 2194 - DNA, 401 bp, Mycobacterium tuberculosis H37Rv
gttcaattcattggtgatctcggtggctgtcatatgcgaagcaacgacgccggtaccagaccaggtggcggggttcatgacgttttcctggttggctaggtagcccttggcgattcccatggcttgctccatattcgcctggatatcgttggcggtgctgcgcagcatctgcggtgttacctgaattgtgtctgccacgggcccttctcctttactgccgttagccgttccccctcaaatatcggggcatgacgcgaagtgtatggctgctctgcggacctgtcgattcaccctgtgcccgagctagatctaccgccggtcatcgacaacacgcaccgtcgcggcctgctcggacttgccatgggatccgcggtgaccccccgccgcatgtccgaccggca

SEQ ID NO: 2195 - DNA, 400 bp, Mycobacterium tuberculosis H37Rv
agccaccagcctatcgaccggctcggggtcttccagcggcgccaaccacggccggcgcggcgatcggtgcggcacgttgtatagcgactcccgcagcacgtcgacgatcttcttcttcttgaaaccgtcgtcgtaatagaggaattcgtcgggttccgcatcggcggccgcggcggtcgccaatgcctcggcgtcggcggcatccagcggttggtactgccagtcgtacagccggggttgggtcaacgtcatgtcgatggttcgggccacctctttcttcttcggcaccacaaacggcgcagagaggtaaaagcagcggaacggttccagatcccgcggccccaccttgagcagcgcgaaaccgttctccttcgacggcagatggtaggcggcgtcgctg

SEQ ID NO: 2196 - DNA, 401 bp, Mycobacterium tuberculosis H37Rv
cggaattttggtcgcggttggacaaactcagcggcattctcaataccccctggggctgcggcgaggatcggcctgctggatcagatcggccagattcgatgcgtcggcggccaccccgtagtggcctctcgcgtagttgatgaacgcgcatgcctgggcgaccaaatcgtggatgttggtcgacgtgcccggctcgtgataggccgcgaacgtcggagcgatgaactgccagacgcccctgctgggggtgccccgcgcggcgttggaatcccagtggtttatggcgttggcgttgtagttcgattcgcgacgggccaccaggtccatgccgcgagtccagcgtgcccgcgcggctggatcgtgaacgccttggatatccaacgctttttggatcgccgcca

SEQ ID NO: 2197 - DNA, 400 bp, Mycobacterium tuberculosis H37Rv
tgacgcgacccgactactcagtcgtggcgcgaaggccgacctcgccccagggcgactattccttaaccttgtcgtcgttcggcacaacaaggatccgtcgcgtcgacttggtgaccaccggcttgtcgtcggcagatttcaccggaacactcggcggtactgttaagcggcccttgaccggttgaccattcggcacagcccgtcacccgcttctcgaccggcttgtccttattggctccttccgcgcccgcacccaacgcgcccggcggcaccatcggcatgccggtcatgccggccggccccgacgcccgcggggtgccactaaccgggtccggcgtcaccgacttggccggcgccccggctggagtcgtcggtggcgacgacgtcggcacgggtgggg

SEQ ID NO: 2198 - DNA, 401 bp, Mycobacterium tuberculosis H37Rv
ggccgacagtgccgaggcgccggccattgtcgacgagctcgcaccagcctgtccagccacagctttcgaggctgcgcgctccaccggagaaaccagcgccccacccgccgatggggccgatgacgccgagggcgccaccggcgcgccggatacgggcgccgtaggaaccgagggcacggcgggggctgccacgacggggggccgtagatcagagccgtaagccggcagcggtcccgcggggacagccgagccaccaaccaccggcgcagcgggtgccgccaccggcccggcggtcaccacggtcggcgcgaccggcccggtagtaccggtcgacgccggtggagcgcccgaggtgttcgccggcgtgtcaactggcccgtgtgtggcttcgatgcccgcag

SEQ ID NO: 2199 - DNA, 401 bp, Mycobacterium tuberculosis H37Rv
ggtcaacgcttgcctggaccggctgcgtcgggccaaagcccatccgaccgcccctctagaagatgtctatccggtcgcggaccggaccgcgcaggtcgagaccgcgatcgcggtgcagcgggcactgatgcggctgcccgtcgagcagcgggccgcggtggtcgccgtggacatgcagggctattcgatcgccgacacccgcccggatgctgggcgtggccgagggcaccgtcaagagccgctgcgcccgggcgcgggcccgcctagcgcggctgctgggctatctcaacaccggggtgaacatccggcgctgaccccgttgccggtccgtcgtagcatcgatccacgggctcgccgctaccccacatctggctattgccaccgggcatgacggacactgg

SEQ ID NO: 2200 - DNA, 464 bp, Mycobacterium tuberculosis H37Rv
cgggtgtcgaacgctgcccggtttccgtcccctctcggggttttgggtctgacgacatgcgaatccgctgtcagcacatgggattccgagtgtttccgtcccctctcggggttttgggtctgacgacctaggcggccccggcgaggctgggggcggtttcacgcgtttccgtcccctctcggggttttgggtctgacgaccagcgcagacggcagccccgagtactcgctctcctcaggtttccgtcccctctcggggttttgggtctgacgacaggctgaaattgaagccggaaatgacgacgcattggtgtttccgtcccctctcggggttttgggtctgacgacctaagcccgctaatcccgcacaagtggtcagaaaagtttccgtcccctctcggggttttgggtctgacgacctgatgattggtcggcgtatgacgtgctactgaggtgttgtttccg

SEQ ID NO: 2201 - DNA, 400 bp, Mycobacterium tuberculosis H37Rv; identical to SEQ ID NO: 1835

SEQ ID NO: 2202 - DNA, 400 bp, Mycobacterium tuberculosis H37Rv; identical to SEQ ID NO: 1839

SEQ ID NO: 2203 - DNA, 401 bp, Mycobacterium tuberculosis H37Rv; identical to SEQ ID NO: 1843

SEQ ID NO: 2204 - DNA, 400 bp, Mycobacterium tuberculosis H37Rv; identical to SEQ ID NO: 1852

SEQ ID NO: 2205 - DNA, 400 bp, Mycobacterium tuberculosis H37Rv; identical to SEQ ID NO: 1857

SEQ ID NO: 2206 - DNA, 400 bp, Mycobacterium tuberculosis H37Rv; identical to SEQ ID NO: 1875

SEQ ID NO: 2207 - DNA, 401 bp, Mycobacterium tuberculosis H37Rv; identical to SEQ ID NO: 1877

SEQ ID NO: 2208 - DNA, 400 bp, Mycobacterium tuberculosis H37Rv; identical to SEQ ID NO: 1889

SEQ ID NO: 2209 - DNA, 400 bp, Mycobacterium tuberculosis H37Rv; identical to SEQ ID NO: 1891

SEQ ID NO: 2210 - DNA, 401 bp, Mycobacterium tuberculosis H37Rv; identical to SEQ ID NO: 1899

SEQ ID NO: 2211 - DNA, 401 bp, Mycobacterium tuberculosis H37Rv; identical to SEQ ID NO: 1907

SEQ ID NO: 2212 - DNA, 440 bp, Mycobacterium tuberculosis H37Rv; identical to SEQ ID NO: 1908

SEQ ID NO: 2213 - DNA, 428 bp, Mycobacterium tuberculosis H37Rv; identical to SEQ ID NO: 1918

SEQ ID NO: 2214 - DNA, 400 bp, Mycobacterium tuberculosis H37Rv; identical to SEQ ID NO: 1920

SEQ ID NO: 2215 - DNA, 400 bp, Mycobacterium tuberculosis H37Rv; identical to SEQ ID NO: 1923

SEQ ID NO: 2216 - DNA, 401 bp, Mycobacterium tuberculosis H37Rv; identical to SEQ ID NO: 1925

SEQ ID NO: 2217 - DNA, 514 bp, Mycobacterium tuberculosis H37Rv; identical to SEQ ID NO: 1940

SEQ ID NO: 2218 - DNA, 400 bp, Mycobacterium tuberculosis H37Rv; identical to SEQ ID NO: 1941

SEQ ID NO: 2219 - DNA, 401 bp, Mycobacterium tuberculosis H37Rv; identical to SEQ ID NO: 1950

SEQ ID NO: 2220 - DNA, 1748 bp, Mycobacterium tuberculosis H37Rv; identical to SEQ ID NO: 1951

SEQ ID NO: 2221 - DNA, 401 bp, Mycobacterium tuberculosis H37Rv; identical to SEQ ID NO: 1969

SEQ ID NO: 2222 - DNA, 440 bp, Mycobacterium tuberculosis H37Rv; identical to SEQ ID NO: 1972

SEQ ID NO: 2223 - DNA, 401 bp, Mycobacterium tuberculosis H37Rv; identical to SEQ ID NO: 1974

SEQ ID NO: 2224 - DNA, 400 bp, Mycobacterium tuberculosis H37Rv; identical to SEQ ID NO: 1976

SEQ ID NO: 2225 - DNA, 502 bp, Mycobacterium tuberculosis H37Rv; identical to SEQ ID NO: 1986

SEQ ID NO: 2226 - DNA, 401 bp, Mycobacterium tuberculosis H37Rv; identical to SEQ ID NO: 1991

SEQ ID NO: 2227 - DNA, 401 bp, Mycobacterium tuberculosis H37Rv; identical to SEQ ID NO: 1992

SEQ ID NO: 2228 - DNA, 400 bp, Mycobacterium tuberculosis H37Rv; identical to SEQ ID NO: 1993

SEQ ID NO: 2229 - DNA, 400 bp, Mycobacterium tuberculosis H37Rv; identical to SEQ ID NO: 2007

SEQ ID NO: 2230 - DNA, 409 bp, Mycobacterium tuberculosis H37Rv; identical to SEQ ID NO: 2008

SEQ ID NO: 2231 - DNA, 1748 bp, Mycobacterium tuberculosis H37Rv; identical to SEQ ID NO: 2018

SEQ ID NO: 2232 - DNA, 401 bp, Mycobacterium tuberculosis H37Rv; identical to SEQ ID NO: 2019

SEQ ID NO: 2233 - DNA, 400 bp, Mycobacterium tuberculosis H37Rv; identical to SEQ ID NO: 2023

SEQ ID NO: 2234 - DNA, 1748 bp, Mycobacterium tuberculosis H37Rv; identical to SEQ ID NO: 2027

SEQ ID NO: 2235 - DNA, 400 bp, Mycobacterium tuberculosis H37Rv; identical to SEQ ID NO: 2031

SEQ ID NO: 2236 - DNA, 496 bp, Mycobacterium tuberculosis H37Rv; identical to SEQ ID NO: 2033

SEQ ID NO: 2237 - DNA, 400 bp, Mycobacterium tuberculosis H37Rv; identical to SEQ ID NO: 2039

SEQ ID NO: 2238 - DNA, 400 bp, Mycobacterium tuberculosis H37Rv; identical to SEQ ID NO: 2041

SEQ ID NO: 2239 - DNA, 400 bp, Mycobacterium tuberculosis H37Rv; identical to SEQ ID NO: 2046

SEQ ID NO: 2240 - DNA, 420 bp, Mycobacterium tuberculosis H37Rv; identical to SEQ ID NO: 2049

SEQ ID NO: 2241 - DNA, 1748 bp, Mycobacterium tuberculosis H37Rv; identical to SEQ ID NO: 2051

SEQ ID NO: 2242 - DNA, 401 bp, Mycobacterium tuberculosis H37Rv; identical to SEQ ID NO: 2052

SEQ ID NO: 2243 - DNA, 401 bp, Mycobacterium tuberculosis H37Rv; identical to SEQ ID NO: 2068

SEQ ID NO: 2244 - DNA, 400 bp, Mycobacterium tuberculosis H37Rv; identical to SEQ ID NO: 2069

SEQ ID NO: 2245 - DNA, 982 bp, Mycobacterium tuberculosis H37Rv; identical to SEQ ID NO: 2078

SEQ ID NO: 2246 - DNA, 400 bp, Mycobacterium tuberculosis H37Rv; identical to SEQ ID NO: 2079

SEQ ID NO: 2247 - DNA, 400 bp, Mycobacterium tuberculosis H37Rv; identical to SEQ ID NO: 2080

SEQ ID NO: 2248 - DNA, 400 bp, Mycobacterium tuberculosis H37Rv; identical to SEQ ID NO: 2081

SEQ ID NO: 2249 - DNA, 462 bp, Mycobacterium tuberculosis H37Rv; identical to SEQ ID NO: 2082

SEQ ID NO: 2250 - DNA, 464 bp, Mycobacterium tuberculosis H37Rv; identical to SEQ ID NO: 2200

SEQ ID NO: 2251 - DNA, 440 bp, Mycobacterium tuberculosis H37Rv; identical to SEQ ID NO: 2085

SEQ ID NO: 2252 - DNA, 440 bp, Mycobacterium tuberculosis H37Rv; identical to SEQ ID NO: 2088

SEQ ID NO: 2253 - DNA, 400 bp, Mycobacterium tuberculosis H37Rv; identical to SEQ ID NO: 2089

SEQ ID NO: 2254 - DNA, 508 bp, Mycobacterium tuberculosis H37Rv; identical to SEQ ID NO: 2093

SEQ ID NO: 2255 - DNA, 400 bp, Mycobacterium tuberculosis H37Rv; identical to SEQ ID NO: 2095

SEQ ID NO: 2256 - DNA, 401 bp, Mycobacterium tuberculosis H37Rv; identical to SEQ ID NO: 2096

SEQ ID NO: 2257 - DNA, 414 bp, Mycobacterium tuberculosis H37Rv; identical to SEQ ID NO: 2098

SEQ ID NO: 2258 - DNA, 400 bp, Mycobacterium tuberculosis H37Rv; identical to SEQ ID NO: 2100

SEQ ID NO: 2259 - DNA, 401 bp, Mycobacterium tuberculosis H37Rv; identical to SEQ ID NO: 2101

SEQ ID NO: 2260 - DNA, 400 bp, Mycobacterium tuberculosis H37Rv; identical to SEQ ID NO: 2105

SEQ ID NO: 2261 - DNA, 1748 bp, Mycobacterium tuberculosis H37Rv; identical to SEQ ID NO: 2108

SEQ ID NO: 2262 - DNA, 1748 bp, Mycobacterium tuberculosis H37Rv; identical to SEQ ID NO: 2109

SEQ ID NO: 2263 - DNA, 400 bp, Mycobacterium tuberculosis H37Rv; identical to SEQ ID NO: 2110

SEQ ID NO: 2264 - DNA, 400 bp, Mycobacterium tuberculosis H37Rv; identical to SEQ ID NO: 2111

SEQ ID NO: 2265 - DNA, 400 bp, Mycobacterium tuberculosis H37Rv; identical to SEQ ID NO: 2114

SEQ ID NO: 2266 - DNA, 400 bp, Mycobacterium tuberculosis H37Rv; identical to SEQ ID NO: 2115

SEQ ID NO: 2267 - DNA, 400 bp, Mycobacterium tuberculosis H37Rv; identical to SEQ ID NO: 2116

SEQ ID NO: 2268 - DNA, 403 bp, Mycobacterium tuberculosis H37Rv; identical to SEQ ID NO: 2121

SEQ ID NO: 2269 - DNA, 669 bp, Mycobacterium tuberculosis H37Rv; identical to SEQ ID NO: 2131

SEQ ID NO: 2270 - DNA, 405 bp, Mycobacterium tuberculosis H37Rv; identical to SEQ ID NO: 2132

SEQ ID NO: 2271 - DNA, 400 bp, Mycobacterium tuberculosis H37Rv; identical to SEQ ID NO: 2137

SEQ ID NO: 2272 - DNA, 1748 bp, Mycobacterium tuberculosis H37Rv; identical to SEQ ID NO: 2138

SEQ ID NO: 2273 - DNA, 400 bp, Mycobacterium tuberculosis H37Rv; identical to SEQ ID NO: 2143

SEQ ID NO: 2274 - DNA, 401 bp, Mycobacterium tuberculosis H37Rv; identical to SEQ ID NO: 2145

SEQ ID NO: 2275 - DNA, 403 bp, Mycobacterium tuberculosis H37Rv; identical to SEQ ID NO: 2147

SEQ ID NO: 2276 - DNA, 401 bp, Mycobacterium tuberculosis H37Rv; identical to SEQ ID NO: 2148

SEQ ID NO: 2277 - DNA, 401 bp, Mycobacterium tuberculosis H37Rv; identical to SEQ ID NO: 2166

SEQ ID NO: 2278 - DNA, 400 bp, Mycobacterium tuberculosis H37Rv; identical to SEQ ID NO: 2170

SEQ ID NO: 2279 - DNA, 416 bp, Mycobacterium tuberculosis H37Rv; identical to SEQ ID NO: 2172

SEQ ID NO: 2280 - DNA, 400 bp, Mycobacterium tuberculosis H37Rv; identical to SEQ ID NO: 2174

SEQ ID NO: 2281 - DNA, 440 bp, Mycobacterium tuberculosis H37Rv; identical to SEQ ID NO: 2177

SEQ ID NO: 2282 - DNA, 400 bp, Mycobacterium tuberculosis H37Rv; identical to SEQ ID NO: 2180

SEQ ID NO: 2283 - DNA, 401 bp, Mycobacterium tuberculosis H37Rv; identical to SEQ ID NO: 2181

SEQ ID NO: 2284 - DNA, 669 bp, Mycobacterium tuberculosis H37Rv; identical to SEQ ID NO: 2184

SEQ ID NO: 2285 - DNA, 401 bp, Mycobacterium tuberculosis H37Rv; identical to SEQ ID NO: 2185

SEQ ID NO: 2286 - DNA, 401 bp, Mycobacterium tuberculosis H37Rv; identical to SEQ ID NO: 2194

SEQ ID NO: 2287 - DNA, 408 bp, Mycobacterium tuberculosis H37Rv
tcgttgtctacggctgtgtgggtgggcaccgtcaagggtgacgagccactggtaaccgcttcgggtgcagcgatttacggctcgggcctgccgtcggacatctggaaggcaaccatggacggcgccttgaagggcacgtcgaacgagactttccccaaaccgaccgaggtcggtggttatgccggtgtgccgccgccgccgccgccgccggaggtaccaccttcggagaccgtcatccagcccacggtcgaaattgcgccggggattaccatcccgatcggtcccccgaccaccattaccctggcgccaccgcccccggccccgcccgctgcgactcccacgccgccgccgtgaccggcgcgctgtcccaaagcagcaacatctcgccacttcctttggccgccgatc

SEQ ID NO: 2288 - DNA, 1688 bp, Mycobacterium tuberculosis H37Rv
acatcgccgcgggcacacccctgcagccttgcaaaacggttgatgcgtggtggttaaagctcccggccgttgtggcttgtgcgagcacggtggcccgggtggtgcgtgagcgccgtggggctcgcgttcaggggtcaatcgggtttgtcgtcgtcgtcttggttgtggaggaatcgttcggggtggtggaaggtgttggtgcggggttggccgtggtcgaggtggggtggtggtagccattcggtgtggccgtgggtgttgttgtgggtggtccagcctttttcggcgagtcggttgtcggggccgcaggccagggtcagctcggtgatgtcggtgcgtccggtgctggtccaggcggtgacgtggtgggcttggctgtggtaggccggtgcgtcacagccgggtttggtgcagccgcggtcgttggcgaacagcatgatccgctgggccggggaggctaggcgtttggtgtgatacagcgccaggggtgtgccgtggtcgaagatcgcctgggggtacctcccgcttgcgggggagtagtggtgggcgtggctggtcatgcggatcacatcggccatgggtagcagggtgccgccgccggtgaagcccttgccggcgccggtttgcaggtcggtcagggtggtggtgaccacgatcgagacgggaagaccgttgtgttggcccagtttcccggaggcgatcagcgcgcgcagcccggccagcagcccgtcgtggttgcgttgggcttggctgcgggtgtcgcggtcgatggcggccgcatcgggggtggtgtcgatgaccggggtgtggtcgtcggggttggtcgcgccgggggcggccagtttggctagcacggcttcaaaggtggcccgcgcttggggggtcaggtagccacttagccgtgacatgccgtcgtattgctggttgctcagggtgatgccgcgtttgcgggcgcgttcggtgtcggtgaggtcgccgtcggggtgtagccagtccatgacccgctgggcgtagcgggccagctcgtcgggacgatattgagcggctttgccggccaggtcggcttcggcggcctggcgggtggacacatccaccgcggcgggcaggtgggcgaaaaagggcgcgaatcactttgacgtgcgcctcgccgatcaggccctggcgttgggcggtggcggtggcggtcaactgcggggccaacggttcgccagtgagcgcccgacgttgccctaaggcttggcttcggcgctgcgtcggccggcttcgggcttggtgatgcgcagccggttggccagcgcgcagcacagcgtgccgcccagttcttcctcgctggcttgggtgtcgagttggttgatcaacgtgtgctgggccgccggtagccggcgcgccaagcattccagacgttccagagaccgcagccgttccggggtgctcagcacctcaaaggacacctcgtccaagcggtccaggtcggcatccagcgcgtcgaagacctcgacaagctcctcccggctattcgctaacatgttcgaatcataacgtcgggcactgacaaagagcgccccgctgataaccgtgaaactgaagtgacacaagggatttacccagatcctacgagttgatacgggaaggtaccgcacctttcctgggcgcgatgggaactttctgcccgttatggccgactaaca

SEQ ID NO: 2289 - DNA, 432 bp, Mycobacterium tuberculosis H37Rv
cagcccgcaggctgatgctgggggatctgggccggccgaccatggctggccggctgttggtctgatggccggttcgcggttacaggccgttgagcccgttctcgccgatgatcagcccgctggtgccgccggcgccgggtgtgccgccggctttcccgccgttgccgccgttgccgccgttgccgatcagcacggcgttggggaccgagctcgaattcccaccggtgtcagcgccaaacccgccggcgccgccgtcgccgccgttgccgaacaccccggccgtaccgccgtcaccgccggtgccgccgctgctgccgatgccgctggagccaccggtgccgccggcaccgccgaagccgaagagcgagccgccactgccgccgttcccgccgaccccgccggtcccgccgacatttaaggcgctgccgccgc

SEQ ID NO: 2290 - DNA, 451 bp, Mycobacterium tuberculosis H37Rv
ccgggaccgccgaccccggcggccccgaacagcatgccggcggccccgccggcgccgccggcgccgccggtccccgtgctggccctcccgccggcgccgccggcgccgccgttgccgatgagcccgccggcgccgccgttgccgccggccccgccgttgacgccggccgcgccggatcctccggcgccgccgttgccgattaaccagccgccgtccccgccattggccccggtgccgggggcgccgttggtgccgttgccgatcagcgggcgcccggtattcgccaggaagaactcgttgatcggggcgagcagcggcgaggtggcggcggcctcggcggcggcgtacgcgccgccaccggaggtcaacgcctgcacgaactgggcatgaaacgcctgcgcttgggcgctgagcgcctgataggcctggccgtgggcgccgaacagcgccg

SEQ ID NO: 2291 - DNA, 490 bp, Mycobacterium tuberculosis H37Rv
cgacggctacagctgcggctacgagaacgtcaagatcctcgatggggttcggaatggcgtcgaagggcggcggtaggaaggactgcagggttggtagcaggctcacgtcggtcgccgcggcggccggtactaccgcctgagccgctgtcgcggcggcgtcactcagcgacccggccccgctggtggtcgccggtggcgggtgaacggcgcaactgggacgcggcccccgaggcgcccgcatagccgtccatcgccaagatgtcatgggcccacatttcgccgtagtgcgtttcactagtcgcgatcgccggggtgttctgtccaaaaacattggtctggaccagtgacagcattgtgcggcggttggccgcgattaccgtcgggggcacggtcgccgcgtacgccgactcgtaggcgttcgccgcggccacggcctgagccgcggcctgctcggccgaggcggcggtggccctcatccacgcgacatagg

SEQ ID NO: 2292 - DNA, 411 bp, Mycobacterium tuberculosis H37Rv
acgcgcaattcgtggcggccaccgggcgcccgctgatcggcaacggcgccaacggcgcccccgggaccggagccaacggcgggcccggcgggtggttgatcggcaacggcggcgccggcgggtctggcgcccccggcgctggggccggcggtaacggcggggccggcgggctgttcggcagcggcggggccggcggggcctccaccgacgtcgccggcggggccggtggggccggcggggccggcggaaacgccggcatgctgttcggcgccgccggggtcggcggcgtcggcggattctcgaacggcggtgccaccggcggggcaggcggggccggcggggcgggcgggctgtttggcgccggaagggaacgcggcagcggcgggtcgggcaacctcactggcggggccg

SEQ ID NO: 2293 - DNA, 2784 bp, Mycobacterium tuberculosis H37Rv
tgtcgcggtggtttgttccggatcacctggtgtctggctcactttgcgtctgccgtcctcttggggttggcgttgagcagtattgccggcactaggtgagaaggaccggccggcgtgacttgataggagcgtggctttcgccccgactgagatgtgtccgccgaccggcccaacctcaacaccccctcaagtgaaggaggtgaaccgccccggcatgtccggagactccagttcttggaaaggatggggtcatgtcaggtggttcatcgaggaggtacccgccggagctgcgtgagcgggcggtgcggatggtcgcagagatccgcggtcagcacgattcggagtgggcagcgatcagtgaggtcgcccgtctacttggtgttggctgcgcggagacggtgcgtaagtgggtgcgccaggcgcaggtcgatgccggcgcacggcccgggaccacgaccgaagaatccgctgagctgaagcgcttgcggcgggacaacgccgaattgcgaagggcgaacgcgattttaaagaccgcgtcggctttcttcgcggccgagctcgaccggccagcacgctaattacccggttcatcgccgatcatcagggccaccgcgagggccccgatggtttgcggtggggtgtcgagtcgatctgcacacagctgaccgagctgggtgtgccgatcgccccatcgacctactacgaccacatcaaccgggagcccagccgccgcgagctgcgcgatggcgaactcaaggagcacatcagccgcgtccacgccgccaactacggtgtttacggtgcccgcaaagtgtggctaaccctgaaccgtgagggcatcgaggtggccagatgcaccgtcgaacggctgatgaccaaactcggcctgtccgggaccacccgcggcaaagcccgcaggaccacgatcgctgatccggccacagcccgtcccgccgatctcgtccagcgccgcttcggaccaccagcacctaaccggctgtgggtagcagacctcacctatgtgtcgacctgggcagggttcgcctacgtggcctttgtcaccgacgcctacgctcgcaggatcctgggctggcgggtcgcttccacgatggccacctccatggtcctcgacgcgatcgagcaagccatctggacccgccaacaagaaggcgtactcgacctgaaagacgttatccaccatacggataggggatctcagtacacatcgatccggttcagcgagcggctcgccgaggcaggcatccaaccgtcggtcggagcggtcggaagctcctatgacaatgcactagccgagacgatcaacggcctatacaagaccgagctgatcaaacccggcaagccctggcggtccatcgaggatgtcgagttggccaccgcgcgctgggtcgactggttcaaccatcgccgcctctaccagtactgcggcgacgtcccgccggtcgaactcgaggctgcctactacgctcaacgccagagaccagccgccggctgaggtctcagatcagagagtctccggactcaccggggcggttcagaggcaaccaccatggttgttgttggaaccgatgcgcacaagtacagccacacctttgtggccaccgacgaagtgggtcgccaactcggtgagaagaccgtcaaggccaccacggccgggcacgccacagccatcatgtgggcccgtgaacagttcggcctcgagctgatctggggcatcgaggactgccgcaacatgtcggcgcgtctggagcgtgacctactggcggccggccagcaggtggtgcgggtacccaccaagctgatggcccagacccgcaagtcggcgcgcagtcggggcaagtcggatccgatcgatgcgctggcggtggcgcgggcggtgatgcgtgaaaccgacctacccctggccacccacgacgagacgtcgcgggagttgaagttgttgactgaccgtcgagatgtccttgtggcccaacgcacgtcggcgatcaaccggttgcgctggctcgtccatgaactcgatcccgagcgggcaccggcagcacgctcgctcgatgccgccaagcaccagcaggccctgcggacctggctggacacccagccaggattggtcgccgaactcgcgcgcgccgagctgaccgacatcatccggctcaccggcgagatcaacaccctagcccagcgcatcagcgcccgagtccaccaggtcgcccccgcactgctggaaatccctggctgcgcggagctgactgcagccaaaatcgtcggcgaagccgccggagtgacccggttcaaaagcgaagccgccttcgcctgccatgccgcagtggctcccatcccggtgtggtcgggcaacaccgccggccagatgcggctcagccgctcgggcaaccgccagctcaacgccgccctacaccgcatcgcactgacccaaatccggatgaccgacagccggggccaggcctactaccaaaggctgcaagacgccgggaaaaccaaacgcgcagcactacgctgcctcaaacgccgcctagcccgcaccgtcttccaggccctgcgcaccgtccaccagcccagctccgaacacacccaacccgcggccgcttgccataggagctattgctcgcgctcgtgccttagtggctgagcgcgaccgacgcctcggcggtgtagcaaaggaacgtcagcgtctcctgcaggtagaggcgcacggtgtccgtgtcgtggctggcgtacccgattgcaacgtcggtgcccagctgtaggtcg

SEQ ID NO: 2294 - DNA, 414 bp, Mycobacterium tuberculosis H37Rv
tcggaggtgccggcggattcggcctcactacgggtgggcctggggcggccggcggcgacgccggcctgctgttcggctccggcggcgctggcggggccggcggctccggccgaaccgacctcggcggcgctggcggagccggcggcaaggccgggctgatcggcaacggcggtaacggcggggccggcggggccggcgggaacggcggcggggacggcgggcccggtggagccgccttcgggctcggtaacggcggcaacggcggcaacggggggaccggcacgtccgcgggcagccccggtgccggcggcgccggtggttcgctgatcggcgcggaggggctgcccgggctgctgccctagccggcccggttggaccacgtgatcgacgaccgtcacaagtcgacacgccgaa

SEQ ID NO: 2295 - DNA, 888 bp, Mycobacterium tuberculosis H37Rv
gtgacggcgccggcggccccaccggcaccgccgaccccacccgcaccgccgataccgccgaccgggccgcggccggcaccgccggccgtgccggcgcgggcgaggctgaccgcgccgccggtgccgccggccccaccgttgccgatcaacccggccgccccgccggcgccgccggcctgtccgggtgcccccgacccgccgttgccgccgttgccccacagccacccgccgttaccgccggcttgcccggtcccgtcgatcccgttcgcgccgtcgccgatcaatgggcgcccggtcagcgactgaacgggtgcgttgatcgcatcgagcacgttctgcagcggtgttgcgctggccgcttcggcgaccgcgtaggtgctgccagcttggcttaaggccagcacgaaccgttgctgataggccgcgacctgcgcgctgatcgcttgatagtgctggccgtggctgccgaacagcgcggcgatcgccgttgacacctcgtcttgggcggcggccaacacctgggtggtcgccgccgccgcggtgttggcggtgttgatcgccgagccgatccgcgctgcatcggccgcggctgtggacactaactgtggggccacgttgacaaacgacatcgaaatcctcctgaccgccacgatgttgagatgcgggcggcccaccgcctgttaccgccgcggtgggtaaccgtttattcggacgatccctgccgttccacgcctgggcgcaggcgcaaaccgcaccaacattggtggaacgtggtgcacactgcacctggggttctgccctcatcgtgtgtcagcaggcgaaacccgcgcggacgagaactcctgcgttaagcagcacaaatcgctgctcacgctcaccggtcagcgc

SEQ ID NO: 2296 - DNA, 561 bp, Mycobacterium tuberculosis H37Rv
cccaacacgaggacgagcacgacggcggcggcgccggccactaagggccacgggttggttttgcgcggggtctgggcccaggggctggggccgccggacggcggtgcgccccagccgccgccctggtagtactgcggggtgggagtgggtccgctggccggcatcgggccgctattgggcgcccaggacggctggccggtggggccaggccgctgtccggcaggccccggctgggccgggggcgtgtaggacggctttggtgccggctggacacccggcggggtgacggggggtgcgggtggctgccgaggagccatggcggtggccggcatggtcggaggcgggacgggcttaggcggcgcgggcagggtggattcttggctgcggcgcaggatgtcggcggcgtggtcttggtcggggtcgctgagcgcttcgtgggcggccagggccaggtcgccggcgctggcgtagcggtcttcgggctttttggccatgccgcgggcgaccaccgcgtcaaaggctttggggatgcccgggcggatggcgctgggctgggggatg

SEQ ID NO: 2297 - DNA, 412 bp, Mycobacterium tuberculosis H37Rv
tcgttccaggctcggcgccgctcgacgtcgagcgcctcggtggcccaggccaccacatgaaacggatcggcgcattgaatcgcatccgggcagcgctcggtgaccacgtcagcgatccagtccgcggcatcggccgaaacgtgagtaatctgggcggcccgctcagcgcccagggcatcgaagaacaagcccagggtggccttgtcgtggcccggggcggcccacaccaaccggccgctgtcgtgatcgacgaccaccgtcaggtaccggtggtggcgcttgtaggagatctcatcgataccgatgcggcgcaagttcgcgaaccggtcaatgcgcttttcggtgtcggcccagacccgggccacgatcgccccgacggtgcgccaggcgatccgcatcaactcgcacaccg

SEQ ID NO: 2298 - DNA, 412 bp, Mycobacterium tuberculosis H37Rv; identical to SEQ ID NO: 2297

SEQ ID NO: 2299 - DNA, 505 bp, Mycobacterium tuberculosis H37Rv
ccatcgacacacccgagttggtcatcgacacgtggttgttgagcatcgacacgatgttgctgagcggcgacagatgcggcgagatggctttccagagttcactcagttggtcgaacggccagatgcttttcgtgggctgggccagttgttgcagcgcttggggcacattgttcatcaactggttcgccgcggcggtgtcgatggcctcctcgaccgcgacggcctgctcaaggagcccgccggggttggtgatcagtggggcgtcctcgaacggcagcaacgcctcggtcgccgtcgccgccgtggcggcgtagccaaacatcgcggcggcgtcttgggcccacatctccccgtattcggcctcgttgaccgcgatcgccggggtgttttgccccaagaggttggtcgctatcagaatcatcagttcagcacggttctcggcgatcaccggcgggggcaccgtcagcccatacgccgtctcgtaggccgccgcagcaacccggac

SEQ ID NO: 2300 - DNA, 401 bp, Mycobacterium tuberculosis H37Rv
accagattcagcacggcctggtaatcgacaggattctgggactatcagactccagcatcacggttctcacccgggcccaggtcgaggcgatggtcgcggcgctgccgcgaagctactgattccgcgcagctgctctgtcagggccgctgacttttctctcggtcatcgtggtcgcaggcgccgcactcggtgtcttcgggtggggaagcgcgacctcgaaggccactgaaacgccttacggagacgcgacgaaccaaatgccgacgaatacggcgaggccggtggctaccgggagcctgccacagaggatcgcccaacctgcccagatcgttgcctggccgaggaacatcgggttccgcgagaacgcgtagggacctccagctcctcgatgacccgcctca

SEQ ID NO: 2301 - DNA, 1498 bp, Mycobacterium tuberculosis H37Rv
ccgccattgccgaccagcccgccggccccgccggccccgccgttaccgccggctttgccgcccgatgagaagtgggcgccgttgccgccggccccgccgttgccgccgctggtggggctggccccggccgcgccgtgggcaccgatcgtggagccggctccgccggtgcctccggccccgccggcgccggggtcaccgccgttatccccagcgacaatcaaggcacgagaaaatccggccccgccggccccgccggtcccgccaaccccaccggccccgccggccccaccggcgccggccagccagccgccccgccctccggtgccgccatcgccggcgtcgccgccgaccccaccggacgtaccgtgcggggacaagtcctcaccggctgcgccggccacaccctccgcgccgtgtccgccggcaccaccgtgcccgcccacgcccaacagcccggccgcacccccgacaccgccgtgtccacccacaccaccgatcgggccgggcccgccggcacctccgtgcccgccggccccgtagagggtcccgcccaggccaccggcaccaccggtaccgccgaccccgccgggcccgccgggcccgccgggcccgccggttccgccgaccccgaacagtccggcgttgccgccggccccgccggttgccccgcccagcaggctctgcccgccggccccgccgactccaccattgcccagcagccagccgccgctacccccggccccaccggcggcgccggccccaccggccccaccggccccgccggtgccgaacaacccggcggccccgccggccccgccgacttggccgggcgcgcccgagccgccggccccaccgttgccccacaagatcccgccggccccgccggcctgcccggtgccgggtgctccagccgccccatcaccgatcaacgggcgacccagcaacgcctgggtgggcgcattgagggcattgagcacgttgtgctccagcgtcgccaacggtgcggcgttggtcgcctccgcgctgacatacgagccgaccgcggcgcttaacgtctgcgcaaatcggtcatgaaacgccgccacctgcgtgctgatcgcctgatactcccgagcatggctgccaaacagcgtcgcgatcgccgccgacacctcatcggcgcccgcggccagcacgctggtggtcgaccccgccgccgccgcattggccgcgccgatcgatgacccgatgcgcgccacatctaaggctgcggccgccaccgtctccggggccacgatcaccaacgacatcacagacctcccgccacgcccctgccccttcggcaggtcacactcctgccagataagggtcgcgccgccaccttgtccgattccaggtcaaaatccccataaccagcacgaatctgctgtgcacagtgcacattcgccctactatcggctcgtggcattgcggctagcaacggttggtcttcgggcccaatccttagggcgtcacactg

SEQ ID NO: 2302 - DNA, 981 bp, Mycobacterium tuberculosis H37Rv
gccgcggccgccagtcccaccggccccgccattgccggcgagagttccgccgtcgccgccggcgccgccctggccgccgttgccgccgctattgcctttgccaccgactgcgcccgaatcgctcgcgttcgtccctgcggcgccgttggcgccgttgccgccggcgccgccgttgccgaccagcccgccatggccgccgggtccgccgttggcgccgttggtgcccgcggtggtggcgttggcgccgttgccgccggccccgccgttgccgccgctggtgggggtggcgccgatggcgccctgagcgccggtgatggagccggctccgccggtgcctccggccccgccggcgccggggtcaccgccatggccgccggccccgccggcacctgcgttgaaggcctggttgccggggccgccggctccgcggtcaccgccgacgccaccagcgccgccggtcccgccggccccgccggcgccttggccgcccagcaggctgatcaggccgccggccccgccggggccgccagccccgccagccccgcccatcccgccgttaccaccatcaccgccgttatccccagcgacaatcaaggcacgagaaaatccggccccgccggccccgccggtcccgccaaccccaccggccccgccggccccaccggcgccggccagccagccgccccgccctccggtgccgccatcgccggcgtcgccgccgaccccaccggacgtaccgtgcggggacaagtcctcaccggctgcgccggccacaccctccgcgccgtgtccgccggcaccaccgtgcccgcccacgcccaacagcccggccgcacccccgacaccgccgtgtccacccacaccaccgatcgggccgggcccgccggcacctccgtgcccgccggccccgtagagggtcccgcccaggccaccggcaccaccggtaccgccgaccccgccgggcccgccgggcccgccggg

SEQ ID NO: 2303 - DNA, 431 bp, Mycobacterium tuberculosis H37Rv
gcggcgcttaacgtctgcgcaaatcggtcatgaaacgctgccacctgcgtgctgatcgcctgatactcccgagcatggctgccaaacagcgtcgcgatcgccgccgacacctcatcggcgcccgcggccagcacgctggtggttgaccccgccgccgcgctgttggctacaccgatcgatgacccgatgcgcgccacatccgaggccgccgcggccaccgtctccggggttacgatcaccaacgacatcacagtccacccgccacgcccctgccccttcggcaggtcacactcctgccagataagggtcgcgccgccaccttgtccgattccaggtcaaaatccccataaccagcacgaatctgctgtgcacagtgcacattcgccctactatcggctcgtggcattgcgggaaacctcaccgcgaataca

SEQ ID NO: 2304 - DNA, 1509 bp, Mycobacterium tuberculosis H37Rv
cgacgggcacccattttcgctgcccgcacagctttaggcagtcctcgcgttggcgggccacgccgagctgttcgccggagcggtcttctgagattcggaggtagacagcagcacgcacaggtgtagtgtatctcacaggtccacggttggccgtggtcgaggtggggtggtggtagccattcggtgtggccgtgggtgttgttgtgggtggtccagcctttttcggcgagtcggttgtcggggccgcaggccagggtcagctcggtgatgtcggtgcgtccggtgctggtccaggcggtgacgtggtgggcttggctgtggtaggccggtgcgtcacagccgggtttggtgcagccgcggtcgttggcgaacagcatgatccgctgggccggggaggctaggcgtttggtgtgatacagcgccaggggtgtgccgtggtcgaagatcgcctgggggtacctcccgcttgcgggggagtagtggtgggcgtggctggtcatgcggatcacatcggccatgggtagcagggtgccgccgccggtgaagcccttgccggcgccggtttgcaggtcggtcagggtggtggtgaccacgatcgagacgggaagaccgttgtgttggcccagtttcccggaggcgatcagcgcgcgcagcccggccagcagcccgtcgtggttgcgttgggcttggctgcgggtgtcgcggtcgatggcggccgcatcgggggtggtgtcgatgaccggggtgtggtcgtcggggttggtcgcgccgggggcggccagtttggctagcacggcttcaaaggtggcccgcgcttggggggtcaggtagccacttagccgtgacatgccgtcgtattgctggttgctcagggtgatgccgcgtttgcgggcgcgttcggtgtcggtgaggtcgccgtcggggtgtagccagtccatgacccgctgggcgtagcgggccagctcgtcgggacgatattgagcggctttgccggccaggtcggcttcggcggcctggcgggtggacacatccaccgcggcgggcaggtgggcgaaaaagggcgcgaatcactttgacgtgcgcctcgccgatcaggccctggcgttgggcggtggcggtggcggtcaactgtggggctagcggttcaccggtgagtgctcgacgaggtccgagatcggcggcgtcggcgatgcgccgggcggcgtcgggcttggtgatgcgtaaccggttggccagcgcgcagcacagcgtgccgcccagttcttcctcgctggcttgggcgtcaagttggttgatcaacgcgtgacccaccgccggtagccggcgcaccaagcattccagacgttccagagaccgcagccgttccggggtggtcaacacctcaaaagacacctcgtccaagcggtccagctcggcatccagcgcatcaaagacctcgacaagctcctcccggctattcgctaacatgttcgaatcataacgtcgggcactgacaagaagtcgcgccga

SEQ ID NO: 2305 - DNA, 2600 bp, Mycobacterium tuberculosis H37Rv
tgccatcagcgtccccagggcatcggcggcgtcttggcgccggcaacgctgttgtctggcagtcgcgccggggagtcgacgctaccggtcggcaccgcgccggccgcgcatgagtgaggtggcagcgcgtaacgcgccgcgtagtgcgtagacggcagtcaccgccgccaacaggatcaacaggacaaaggtcggcaacctgaaccgccccggcatgtccggagactccagttcttggaaaggatggggtcatgtcaggtggttcatcgaggaggtacccgccggagctgcgtgagcgggcggtgcggatggtcgcagagatccgcggtcagcacgattcggagtgggcagcgatcagtgaggtcgcccgtctacttggtgttggctgcgcggagacggtgcgtaagtgggtgcgccaggcgcaggtcgatgccggcgcacggcccgggaccacgaccgaagaatccgctgagctgaagcgcttgcggcgggacaacgccgaattgcgaagggcgaacgcgattttaaagaccgcgtcggctttcttcgcggccgagctcgaccggccagcacgctaattacccggttcatcgccgatcatcagggccaccgcgagggccccgatggtttgcggtggggtgtcgagtcgatctgcacacagctgaccgagctgggtgtgccgatcgccccatcgacctactacgaccacatcaaccgggagcccagccgccgcgagctgcgcgatggcgaactcaaggagcacatcagccgcgtccacgccgccaactacggtgtttacggtgcccgcaaagtgtggctaaccctgaaccgtgagggcatcgaggtggccagatgcaccgtcgaacggctgatgaccaaactcggcctgtccgggaccacccgcggcaaagcccgcaggaccacgatcgctgatccggccacagcccgtcccgccgatctcgtccagcgccgcttcggaccaccagcacctaaccggctgtgggtagcagacctcacctatgtgtcgacctgggcagggttcgcctacgtggcctttgtcaccgacgcctacgctcgcaggatcctgggctggcgggtcgcttccacgatggccacctccatggtcctcgacgcgatcgagcaagccatctggacccgccaacaagaaggcgtactcgacctgaaagacgttatccaccatacggataggggatctcagtacacatcgatccggttcagcgagcggctcgccgaggcaggcatccaaccgtcggtcggagcggtcggaagctcctatgacaatgcactagccgagacgatcaacggcctatacaagaccgagctgatcaaacccggcaagccctggcggtccatcgaggatgtcgagttggccaccgcgcgctgggtcgactggttcaaccatcgccgcctctaccagtactgcggcgacgtcccgccggtcgaactcgaggctgcctactacgctcaacgccagagaccagccgccggctgaggtctcagatcagagagtctccggactcaccggggcggttcaggccccgatggtgtgcccggtggtgatacgggcacaccagcaccaggttggccagctcggtggccccaccgtcctgccaatgtcggatgtggtgggcgtgcaaaccccgggtggccccacaaccgggaaccacacacgtgcggtcgcgatgctcaagcgcacgacgcaaccgacgattgatctgacgagtcgttcgaccgcagccaatgacctgcccgtcacgttcaaaccaggcctcaaaggtggcatcacagagcagatatcggcgttcggactcgctgagcagcggacccaggtgcaggccagcggcacgctcctgcacgtctagatgcatcaccacggtggtgtgctgcccatgtggccgacgagccacctcggcgtcccagccggcctcaaccagacgcagaaacgcctcaacattgcccggcaacgggggccgctgatccgacacaccgtcgctgttgtcgtgatcacgcttgtactcggcgatcaacgcatccagatgagactgcaacgccgcatcgaacttcgccgcctccacgtgcggaagcttgattcgccaacaactgaactgctcatcggcgctcctggtgatcgagggccgcggttccggccgaaaatccggttcgggttcgggtcgcggttccaacttgagcgcggtccgcagctgattcaccgtggcaacgccggccaactgcgcataatgcgcatccgaaccctcacccgcccgccccgcgatcaccccaacctgatccaacgacaaccgcccctcccgcataccccgggcgcagcgcggaaactccggcaaccgccgcgccaccgtggcgatcgtgtgggcgttgcctgacgagcagcccatcttccaggccaccaaccccgccaccgaccgcgcccccgtcacaccccacaacccgtcgcgatccagctcagccacgatctccacaatgcgcccatcaatcgcattgcgctgaccggccaactccgccaactcctcaaacaacacctccacacgctcggcaggactgactaccgctgcgccagacgt

SEQ ID NO: 2306 - DNA, 452 bp, Mycobacterium tuberculosis H37Rv
gggaatccggggaaaaatggcggaatcgcgggaatctcaggagtgcctagctgtatcgatatgctacccgggcctatgctgccaacggtgggatttacgccgaataagccgatcgcaagcggagacgcggggatcgaaatcgatcccacgttaatgacctggaacgccgatagctctaggccaatagaatttagagtgatcggcgggatgttgatggggccaacgagtgccccggtactgttgatgcccagcccgatggcgggaacagtaataggcggaacattgatcggccccaccaacgctccggaactgttaatgcccaggccgatttcgggaatggtgatggacgggatggtgatggggccgacggagccgaggccgttgaggtctaggccagcagcgggaatggtcagtgtgccggagaagccgatcaagccctggtagtcgcctcg

SEQ ID NO: 2307 - DNA, 1125 bp, Mycobacterium tuberculosis H37Rv
gcgacggtgaggttgtctgccggtccggtaatggtgatcaggccccgatggtgtgcccggtggtgatacgggcacaccagcaccaggttggccagctcggtggccccaccgtcctgccaatgtcggatgtggtgggcgtgcaaaccccgggtggccccacaaccgggaaccacacacgtgcggtcgcgatgctcaagcgcacgacgcaaccgacgattgatctgacgagtcgttcgaccgcagccaatgacctgcccgtcacgttcaaaccaggcctcaaaggtggcatcacagagcagatatcggcgttcggactcgctgagcagcggacccaggtgcaggccagcggcacgctcctgcacgtctagatgcatcaccacggtggtgtgctgcccatgtggccgacgagccacctcggcgtcccagccggcctcaaccagacgcagaaacgcctcaacattgcccggcaacgggggccgctgatccgacacaccgtcgctgttgtcgtgatcacgcttgtactcggcgatcaacgcatccagatgagactgcaacgccgcatcgaacttcgccgcctccacgtgcggaagcttgattcgccaacaactgaactgctcatcggcgctcctggtgatcgagggccgcggttccggccgaaaatccggttcgggttcgggtcgcggttccaacttgagcgcggtccgcagctgattcaccgtggcaacgccggccaactgcgcataatgcgcatccgaaccctcacccgcccgccccgcgatcaccccaacctgatccaacgacaaccgcccctcccgcataccccgggcgcagcgcggaaactccggcaaccgccgcgccaccgtggcgatcgtgtgggcgttgcctgacgagcagcccatcttccaggccaccaaccccgccaccgaccgcgcccccgtcacaccccacaacccgtcgcgatccagctcagccacgatctccacaatgcgcccatcaatcgcattgcgctgaccggccaactccgccaactcctcaaacaacacctccacacgctcggcaggactgactaccgctgcgccagacgtcgcggtcgaggacatgagttcatcatcgcagcagggtctg

SEQ ID NO: 2308 - DNA, 467 bp, Mycobacterium tuberculosis H37Rv
tttgccagcgcgagcaacagatccagcactcccgcctgccgtaagcgcttgaccggaatggacgccacaatgcgttgtagttcggcttccccggccgccacggctgaagtgtcttgcggtgatgagccgagcagttctcgacgcatatagccggccagcgccgcggagttggggtagtcgaagatgagcgtgggtgaaagcgccaggccggtggcggatttgagccggttgcgcatttcgaccgcggtgagcgagtcgaaacccaactcctggaatgccctatccgggtcgatggcttcggggctggcgctacccagcacggtggcgatgtgcgagcgcaccaggtccagcaggacggcgtgttgctcgtcttcgggcagtccttccaggcgttgcagcagagccgatttcgatttcgccgcggccaacgagtcatcgacctggcgcctggtcggcgcgttgatcag

SEQ ID NO: 2309 - DNA, 422 bp, Mycobacterium tuberculosis H37Rv
aagatgagcgtgggtgaaagcgccaggccggtggcggatttgagccggttgcgcatttcgaccgcggtgagcgagtcgaaacccaactcctggaatgccctatccgggtcgatggcttcggggctggcgctacccagcacggtggcgatgtgcgagcgcaccaggtccagcaggacggcgtgttgctcgtcttcgggcagtccttccaggcgttgcagcagagccgatttcgatttcgccgcggccaacgagtcatcgacctggcgcctggtcggcgcgttgatcagatcgacgaacatcggcggcaacgtgccgccatcgaacttgaccttcaacgccgcaaagtcgatgtgggcgggcagcatgaatggctcgtcgacgatcattgcggtgtcgaacaattgcagggcgtcagcagacga

SEQ ID NO: 2310 - DNA, 1528 bp, Mycobacterium tuberculosis H37Rv
gttgatcagatcgacgaacatcggcggcaacgtgccgccatcgaacttgaccttcaacgccgcaaagtcgatgtgggcgggcagcatgaatggctcgtcgacgatcattgcggtgtcgaacaattgcagggcgtcagcagacgacatcgccacgatgccgtcgcgggcgaagcgtttgaagtccaccgtcgccaggccgccggtcatggcgctggcctgatcccacagaccccagcccagggagatggccggcagcccatgggcccgccggtgggcggccagcgcatccaaaaacgaattggcggccgcatagttggcctggcccgacgatccgaccagcccggccatcgacgaaaacatgacaaacgccgacacatccaggtcgcgagtcaactcgtgcaggtgccacgccgcgtccaccttggaccgcaacaccacatccacccgatccggtgtcagtgacatcaccaccgcgtcgtcgagtgcgccggcggtgtggatcacgcccgacaatggatgctgaaccggaatatcggcgatcaccttggccaacgccgctcgatccgccgcgtcacaggccaccacctgcacctgcgcaccggcggcggccaactcggccaccagctccgcagccccgggagcatccgggccgcgccggctcaccaacaccagattgcgcaccccatgacgagccaccacgtgacgggccaccgccgaacccgccatcccggtgccaccggtgatcaacaccgtgcccgccgcccacgagccgggcatcagcatgacgaccttgccggtgtggcgcgcctggctcagataacgcaacgccgcaggcgcgcaccgcacgtcaaaagtggtgaccggcaacggccgcagcaccccatcgccgaacagcgtggcgagctcggcaaggatctgcgcaatgcggtccggtcccggttcgaataggtcgaaggcgcggtagcgcacgcccgggtactgctgggcgatcacgccggggtcgcggatgtcggtcttgcccatctccaagaacaccccacccggtgccaccagacgcagcgacgcatccacgaattcaccggccagcgagtccaacaccacgtcgaaccctcgaccgccagtggccgcgcggaacttgtcctcgaactctaggctacgtgaatcggatatgtggtcgtcgtcaaagcccatggcgcgcaaggtgtcccacttacccttgctcgcggtcgcgaacacctccaaccccagatgccgagccagctgcaccgccgccatgcccaccccgccggtgccggcatggatcaacacgcgctggcccgacctagcagcggccaaatccaccagcgcgtagtgggcggtggcgaacaccaccgaggtggtggcggcggccgtgtgcgaccaccccgccggcaccttgaccagcagccgctggtcggtgctggcgacggttccggtgccctcggggaacaggcccattacccggtctccgaccgcgaaagatcccttgttcaagctggtttcgataacg

SEQ ID NO: 2311 - DNA, 1139 bp, Mycobacterium tuberculosis H37Rv
cggcgcgctggctaggtcggagaacatgggcggcaccgccaccgcatgggctcgcagtgcggtgaggtcaatgcgggcgggcgccaggaatggctcgtcgacgatcattgcggtgtcgaacagttccagcgcctcagcggtggacagcgccagcaccccttcacgacccagccgggccaggtctgcggcgtccaggccgccggtcatggcgctggcctgatcccacagaccccagcccagggagatggccggcagcccatgggcccgccggtgggcggccagcgcatccaaaaacgaattggcggccgcatagttggcctggcccgacgatccgaccagcccggccatcgacgaaaacatgacaaacgccgacacatccaggtcgcgagtcaactcgtgcaggtgccacgccgcgtccaccttggaccgcaacaccacatccacccgatccggtgtcagtgacatcaccaccgcgtcgtcgagtgcgccggcggtgtggatcacgcccgacaatggatgctgaaccggaatatcggcgatcaccttggccaacgccgctcgatccgccgcgtcacaggccaccacctgtacctgcgcaccggcggcggccaactcggccaccagctccgcagccccgggagcatccgggccgcgccggctcaccaacaccagattgcgcaccccatgacgagccaccacgtgacgggccaccgccgaacccgccatcccggtgccaccggtgatcaacaccgtgcccgccgcccacgagccgggcatcagcatgacgaccttgccggtgtggcgcgcctggctcagataacgcaacgccgcaggcgcgcgccgcacgtcaaaagtggtgaccggcaacggccgcagcaccccatcgccgaacagcgtggcgagctccagcatgtactgatgcatccggggacgtcccggttcgaataggtcgaaggcgcggtagcgcacgcccgggtactgctgggcgatcacgccggggtcgcggatgtcggtcttgcccatctccaagaacaccccacccggtgccaccagacgcagcgacgcatccacgaattcaccggccagcgagtccaacaccacgtcgaaccctcgaccgccagtggccgcgcggaacttgt

SEQ ID NO: 2312 - DNA, 506 bp, Mycobacterium tuberculosis H37Rv
gaacgcgaagcgctgcacgaccagttggccgccgagcatgagcgcatcgccggcggggtcgacagtgcgctggacatcggtgtggtcgacgagaagatcgacccggcgcatactcgcagcaagctcaccgaggcgctggcgcaggctccggcacggcgcggccgccacaagaacatcccgctgtagttctgaccgcgagcagacgcagaatcgcacgcgcgaggtccgcgccgtgcgattctgcgtctgctcgccagttatccccagcggtggctggtcaacgcgaggcgctcctcgcatgctcggacggtgcctaccgacgcgctaacaattctcgagaaggccggcgggttcgccaccaccgcgcaattgctcacggtcatgacccgccaacagctcgacgtccaagtgaaaaacggcggcctcgttcgcgtttggtacggggtctacgcggcacaagagccggacctgttgggccgcttggcggctctcgatgtgttcatggg

SEQ ID NO: 2313 - DNA, 2493 bp, Mycobacterium tuberculosis H37Rv
acgtcgcggatgaaatcccacgggtaggccggggcgatgccataacgggccaggtccgacctcggatctgcggcctgtttgaaactgcccacatacccgttacggctcaaggaagtgtcgttgagcccgccgagcagcttgctgttgtacaccttccaactgatgccggcgtcactgaggttctgcggcatgatgcgccaggtgaaggtcaacttcggctggatggcgggttcgacgatctgcggcccaccttgatccccgtcgggattgacggtggcgctgatccaatagagccggttaggcatcgtcccgccaagaagcgacgagaagtactggtcgcagatcgtgaaggtatcggccaacaagtagtggatcggtatgtcaggacgtgcgtaatagcccatcaccacgggcgtgttggccaccgaccgggtccgcgcctgcgccggcagccagccgtcattggcgccgccgttccatgacaagtgcgcggcaatccactggtggtctgggtcgttgacgcactcgccaaccccgttgggacccccggtggtattgatgcggtagggcagcgtaatgccggtggggtccagcgcctgcgtctccgggttccagcccttttgttgaaacagcggcgtcggagtgtcgaacccgtcgacggcagaaagcgtgccgaaatagtgatcgaacgacctgttctcctgtaggcacagcacgatgtgctcgatatcggtcaaatgacccgagcagggaccggcaccataggccttttcgatcaccggtgcggcccagtccgtcaaaaccgccgctgccccggctccagccgccttagccaggaatgctcggcgtgacattccggcgaatgcaccttggctcaccacatcggctctccctcgtgtatttcggcttaccgtcgcggccatcgccgactgtgggtcaacagagaccgctgggaatcccccgagtgggtgcggtttcttgggtgggcatcgactgtgggaatggcacccgatagggaattgccgtcttggtcaccgttcccagtactgcgttgggcacgcactgcggcaacttcggaagcgcattgagccgcgggtggtccagattgggtttcgacgggttcggcggagcggcgaagttgaacgtcgaagtcatatcgccgaccgtcgcgtcccgccaagcggtgagattgggaaccgggacgccgaaccgcgcgcggatgagcttcagcgttgacgtgtgatcgaaggtgtcgtggaccatcagtgggccgcggctatagggagagatgacgaggcaagggacgcgaaaccccagaccgatcggcccacgaatgccacccgagccgggcaccgagtcgatgtcggggaccgtgacgaattcgccgggcgtccccggcggcggtgtcggcggcacgacgtggtcgaagaacccgccgttctcgtcgtagttgacgatcagcgcggtcttttcccacaccgcagggttggacagcaagatccgcagtgcatcgacaattgcaacggcgccgacgttcaccgggaatgcgggatgttcggacagcagaaacccgggcagcacccaggagaccttgggtaatcggttgtttctgacgtcggcggcgaagtccagcgggtaggtcggtgagatgccgaaacgggccagattcgacctcggatccgcggcctgcttgaagtcattgaccagcccgttgtagccgacgacggtgttgttgagagcccccagcaatttgttttggtacaccttccagctgaccccggcatcttcgaggttctccggcatgatgcgccagctgtagtgctgcagaggttggatattgggctcgatcagcaccggcccgccgtcagtgccgtcggggtcgatccaggcgctcatccagtagagccggttgggcgtggtcccgcccagcagcgagcaaaaatagccgtcgcagaccgtgaacgtgtcggctagcaggtagtgaatgggcaggtcacgacgcgtgtagaaacccatcgtgaccggcacgttgccctgcaacggactgaacgggacctgcgccggcagccagttgtcgttggcgccgccgttccacgagttgtgcatgccgatccagctgtggtccgggtcgttgacgcattcgccggcgaccagcgggccccgggtggtgtcgaagcgatatggaagggtgacgccggcggggtcaaccgcctgtgtcatcgggttccagcccgactgcgcgaataccaccggcggggtggtgtcatcgaacccgcgggtgtcagaaagagtgccgaagtagtgatcgaatgaccgattctcctgcatcaacaacacgatgtgctcgatgtcggtcaaatgtccggggcaaggccccgctccgtaggctttttcgataatcggaccagccaaggacatgaaggccccggcggtggtagcggcggcggctttggcaaaaaattgtcggcgggtcattccgtcgacggggtgttc

SEQ ID NO: 2314 - DNA, 1753 bp, Mycobacterium tuberculosis H37Rv
agagcccgttgaattcccgctgccggtgtttccgaagccgatgttgttactgccggtattgccgctaccaaagttgaagttgccgttgtttccgttaccgaagttcgtgtcgccgatgttgccgctgcccacgttggtgctgccgatgttgccgctgcccacgttggtgctgccgatgttgccgctacccaggttttggctaccgaagtttctgaaccgccccggcatgtccggagactccagttcttggaaaggatggggtcatgtcaggtggttcatcgaggaggtacccgccggagctgcgtgagcgggcggtgcggatggtcgcagagatccgcggtcagcacgattcggagtgggcagcgatcagtgaggtcgcccgtctacttggtgttggctgcgcggagacggtgcgtaagtgggtgcgccaggcgcaggtcgatgccggcgcacggcccgggaccacgaccgaagaatccgctgagctgaagcgcttgcggcgggacaacgccgaattgcgaagggcgaacgcgattttaaagaccgcgtcggctttcttcgcggccgagctcgaccggccagcacgctaattacccggttcatcgccgatcatcagggccaccgcgagggccccgatggtttgcggtggggtgtcgagtcgatctgcacacagctgaccgagctgggtgtgccgatcgccccatcgacctactacgaccacatcaaccgggagcccagccgccgcgagctgcgcgatggcgaactcaaggagcacatcagccgcgtccacgccgccaactacggtgtttacggtgcccgcaaagtgtggctaaccctgaaccgtgagggcatcgaggtggccagatgcaccgtcgaacggctgatgaccaaactcggcctgtccgggaccacccgcggcaaagcccgcaggaccacgatcgctgatccggccacagcccgtcccgccgatctcgtccagcgccgcttcggaccaccagcacctaaccggctgtgggtagcagacctcacctatgtgtcgacctgggcagggttcgcctacgtggcctttgtcaccgacgcctacgctcgcaggatcctgggctggcgggtcgcttccacgatggccacctccatggtcctcgacgcgatcgagcaagccatctggacccgccaacaagaaggcgtactcgacctgaaagacgttatccaccatacggataggggatctcagtacacatcgatccggttcagcgagcggctcgccgaggcaggcatccaaccgtcggtcggagcggtcggaagctcctatgacaatgcactagccgagacgatcaacggcctatacaagaccgagctgatcaaacccggcaagccctggcggtccatcgaggatgtcgagttggccaccgcgcgctgggtcgactggttcaaccatcgccgcctctaccagtactgcggcgacgtcccgccggtcgaactcgaggctgcctactacgctcaacgccagagaccagccgccggctgaggtctcagatcagagagtctccggactcaccggggcggttcaacaccgaaaaattcaccactaccgcccctcctctaacaaatcattctcaaccgcacccccgcgcgttaccccaaacgacacgcggacacccgtcaccgagacgtcctacgttgtctgggcgccaaaccggctcgatccccgacttggctcacgattcgcggctcagcattaatcctgtgagtttgc

SEQ ID NO: 2315 - DNA, 1050 bp, Mycobacterium tuberculosis H37Rv
gttggtgccggccccaccgatcccgccgttcccgccggccccgccgttgccgaacagccatccaccggcgccgccggctccgccgttcgcgccggcctcaaagggtaggccctggccgccagctccgccggccccaccgttgccgatcaacccggccgcaccgccggccccgccggcctgcccgggtgcccccgacccgccgttgccgccgttgccccacagccacccgccgttaccgccggcttgcccggtcccgtcgatcccgttcgcgccgtcgccgatcaatgggcgcccggtcagcgactgaacgggtgcgttgatcgcatcgagcacgttctgcagcggtgttgcgctggccgcttcggcgaccgcgtaggtgctgccagcttggcttaaggccagcacgaaccgttgctgataggccgcgacctgcgcgctgatcgcttgatagtgctggccgtggctgccgaacagcgcggcgatcgccgttgacacctcgtcttgggcggcggccaacacctgggtggtcgccgccgccgcggtgttggcggtgttgatcgccgagccgatccgcgctgcatcggccgcggctgtggacactaactgtggggccacgttgacaaacgacatcgaaatcctcctgaccgccacgatgttgagatgcgggcggcccaccgcctgttaccgccgcggtgggtaaccgtttattcggacgatccctgccgttccacgcctgggcgcaggcacaaaccgcaccaacattggtggaacgtggtgcacactgcacctggggttctgccctcatcgtgtggcagcaggcgaaacccgcgcggacgagaactcttccgccaagcagcacaaatcgccctacaccccagtgaatctccggacgccactacgacagcgcgcaacggtcgcctcatcgactgtgtgcacgcgcgcttcgcgatgcgctgccgtggcaagctggccaggtggacctcaatgcgctggccgatctgccgctgacctatccggaggtgggcgcgacagcgaccggacgactgcccg

SEQ ID NO: 2316 - DNA, 456 bp, Mycobacterium tuberculosis H37Rv
acatctcccggcggggtcatttcatgaccaaacgtcctcaccgtcaacgccgccatcatgctcatcctgaatgccggtcaacagacgcggtggcgacccagtcgtcgtagtttccgtcccctctcggggttttgggtctgacgactcgggcacggccgaaacaccgcgcgaagggcggttcaagtttccgtcccctctcgtggttttgggtctgacgactgggaggatgtcactcggacatagctgtcatcggcggtgtgtttccgtcccctctcggggttttgggtctgaggacatggagcagtagcgtggctgtggtgtggcgggcgatatgcgtttccgtcccctctcggggttttgggtctgacgactgctgcacctcccgcacccggtgcgattctgcgtccagtttccgtcccctctcggggttttgggtccgacgaccccgatagtcgc

SEQ ID NO: 2317 - DNA, 881 bp, Mycobacterium tuberculosis H37Rv
tgcgcgttattcaaggtttccgtcccctctcggggttttgggtctgacgacccgagccgaccatccgcatcacaccgaaagggttggcgcaagtttccgtcccctctcggggttttgggtctgacgacacgtggggagagggaatggcaatgatggtcgacgaagtttccgtcccctctcggggttttgggtctgacgacctcggacagcatctccccgggcgggcagcagatatcccatgtttccgtcccctctcggggttttgggtctgacgaccgacccgtggccgccaggttgccgccgccgttgctcacctggtttccgtcccctctcggggttttgggtctgacgacccggaagtcaactagagcgggtgtcgaacgctgcccggtttccgtcccctctcggggttttgggtctgacgacatgcgaatccgctgtcagcacatgggattccgagtgtttccgtcccctctcggggttttgggtctgacgacctaggcggccccggcgaggctgggggcggtttcacgcgtttccgtcccctctcggggttttgggtctgacgaccagcgcagacggcagccccgagtactcgctctcctcaggtttccgtcccctctcggggttttgggtctgacgacaggctgaaattgaagccggaaatgacgacgcattggtgtttccgtcccctctcggggttttgggtctgacgacctaagcccgctaatcccgcacaagtggtcagaaaagtttccgtcccctctcggggttttgggtctgacgacctgatgattggtcggcgtatgacgtgctactgaggtgttgtttccgtcccctctcggggttttgggtctgacgactagaaggcgatcactgga

SEQ ID NO: 2318 - DNA, 430 bp, Mycobacterium tuberculosis H37Rv
aaatgacgacgcattggtgtttccgtcccctctcggggttttgggtctgacgacctaagcccgctaatcccgcacaagtggtcagaaaagtttccgtcccctctcggggttttgggtctgacgacctgatgattggtcggcgtatgacgtgctactgaggtgttgtttccgtcccctctcggggttttgggtctgacgactagaaggcgatcactggaagcacggcgcttgcgagtttccgtcccctctcggggttttgggtctgacgacttggtcaaaagctgtcgcccaagcatgaggcaaaaagtttccgtcccctctcggggttttgggtctgacgacacgactaggggagcgtgatccagagccggcgaccctctatggtttccgtcccctctcggggttttgggtctgacgacgtgcaagaatt

SEQ ID NO: 2319 - DNA, 457 bp, Mycobacterium tuberculosis H37Rv
ccactcgctatcacctccagtcgagcgttggcacggccccagccttacgactgacgacctgatccagaaccatgcgcactagttgttgcggcgatggtgccgccatgtttcatcaggattaacgtaaaacttgctgtgaaagagctttccgtggcgatcgcaagcgcggcgcagccgcgcgcagcgggtcgccaccatcagaccccgtggcgatcgcaagcgcggcgcagccgcgcgcagcgggtcgccaccatcagaccccgtggcgatcgcaagcgcggcgcagccgcgcgcagcgggtcgccaccatcaaaccccgtggcgatcgcaagcgcggcgcagccgcgcgcagcgggtcgccacctcggctagccgagcagggcgtcgacgaatgcggcgggttcgaaaggcgccaggtcatcggggccttcaccaagcccgaccagcttcaccggca

SEQ ID NO: 2320 - DNA, 433 bp, Mycobacterium tuberculosis H37Rv
ccgagggtctgcgggtgaccgccacccggtcacggctgatggcaccgttgtccggccagggcggcatggcactgctggaactcgacgcgcccactaccgaggcgttgattgccgacttcccacaggtgacgctcggtatttacaactcaccacggcaaacggtgatcgccgggcccaccgagcagatcgatgagttgatcgcccgggtgcgcgcgcaaaaccggtttgccagtcgggtcaatatcgaagtggccccgcacaatccggccatggatgctttgcagccggcgatgcgttcggagctggccgatctgaccccacggacccccaccatcggaatcatctccaccacctacgcagacttgcacacccaaccggtcttcgacgccgaacactgggccaccaacatgcgcaaccccgtgcgcttccagca

SEQ ID NO: 2321 - DNA, 596 bp, Mycobacterium tuberculosis H37Rv
ggttggccgccaactccggcaacgtcggcatctccgccaacgcacaaacatagccagccgccgcggcctcatgctcaccggccgccgccgcgctatccgcactggcctgcaccaaccacgccacatacggcacataggcggccacaaacaactcagcactgggaccctgccacaccccggcccccaccgcggccaccaccacgctcaactcttgcgccacagcggcgtactcggcgcttaacgcgctccaccccgccgcggccgcctgcaacgaacccggccccggaccagcacttagcagcgccgaatgcacctccggcggcgacgccaaccacaccggcgccgtcacaacgacccacccgaaaccagatacgtgcccaggacaccgaactcgaccgtgcggtgcgaggacaccggatcacccgctagcggaatcaatgtgcggcggccagccgtgcggtcaacgcctccaccgccgcactggcggccgccaaaccctcaggaaccacgctcagcgtcaccacgcacactccttccttaggcgcctcccacacccatctcccggatttttgctctatcaactgttgtaaatagct

SEQ ID NO: 2322 - DNA, 481 bp, Mycobacterium tuberculosis H37Rv
cgactccttgccagccgtcccaacaaaccccaacgccccagcaccccgatcagaagccagcaccgacaccgacgtgctcgcgggagccggctccaccgccgacaccaaccgcgcctgcggcgacaccacaccacccgacaccggcgccacactgcccaccaacgccgccggcgcgccagcagccgcacccaccgccggcagagcggccaatcccgccaccccggccaacccagctacacccggaaccacagcagcggccaacgcccccaacaacggcccccccaaaaccggaatagcgccaaaaatattcgaaataatccaaccaatactgagtatcgccagttccaagacaaccgcgaattctaatagcggaaccagaacaaatacgcctaacgcaaaacctaccgtggcgaaaaacatatcgatcatcccggtaaggacgagccaaggctcgaaatttaccagacccgtgatcagctcg

SEQ ID NO: 2323 - DNA, 4020 bp, Mycobacterium tuberculosis H37Rv
tgtcgatggcggggataacgacggagcccagtccgccggtgagggtgaggtccaggaacggcgtttggggaagcacggcggggcggtaggagaagccgagcaggccctggtagtcgccccgccagaaggcgccgttgctgtagttaccggagatgaaggcgccggtgttgacgtcgccggagttggccaccccggtgttgatgtcaccggtgttcaaccaacccgtgttgacactgcccgggttgaaaccgcccgtattggcctgccccgcgttgaaactgccggtgttgtagctacccgcattgaccacacccgtgttgaacccacccgcgttgaacaaccccgtgctggcaatccccgaattaccgatcccggtattataactccccgaattgaacaccccccagttcccggtgccagagttaaagaaccccacattaccggtccccgaattaaacaaccccacattcccgctgccggtattgaaaccaccgaacccggtcagattatcaccggtcaacccaataccgaaattcccactgccggtgttagcgaacccaatattgcccacacccatattcgccaaaccgaaattgtagctgccggcattaccaaacccgatattacccaaacccatcagacccggcgttaaccccgaattcgccaacccgacattgccaaacccgacattgcccaacccgacattgttgccgccgatattgccgccacccacattgaacccaccgacgttgcccgcacccaggttaaagtccccgacattgcccaacccgacattgccgccaccgaggttgctcaaccccacgttcgggccgacgatcccgaccgcggaattgaagcccgagatcaggttgttggcgatgctcccgtcgaacaggcccaacagtcccacacccaggcccgggacagccaaaccgctgaagggatccgacgtggtggtggtggagttccctgagcccggctcggtgatgatcgggatgttgatggggcccaccgggattgtgacgtccacgttcagcggaattgcgggcagcacggtggccgggatgaagacggcgtcctcgaggttgatggacacgtcgataggcaggatttcgtgcagaatcattgactttacggtggatgccggggaaccgaaagagaagttgagcggtatggattcactgacagtgggcaacgggatactgagtcccgccatggtgatgggaatagaacttcccggaattacaatcggattcagttcgatgccgtctctgaagtcaaacaagaaaagagtctgaccgaccgacatgaacagctgggcgggctgggtctgtatattcgtgatttggattccggagatatcgatgcttcccgtgatgcccaggccggacagcagggtagtggccggggcgttaaaactcacattgacgtttccgtcgaggccaaaattgatggcggggatggggatgtccgggacggtaaaggggccgacctcgaggtttcccgtgacggtcaggaggggatttagcgcatccacaacggtggtggtcgggatgctgatggggccgatgccgccgttgagggtgaagtgaaatggaaacagcccgctggtgaggccaaagccgcctgggaccgccggaatggggccgttggccggggttggcgggatgtagtcccaccggaacgggaaagggccaatagaaagggtggtgtgcaggtccaccgggatgcggtcaaccgtgaaaccctgcgggaacacggtgaatccaccggtgccgacggagaagttggtgaggctgaccacggggttttccgggaacgccaggccgcccgggaatagcgtgatgctgtccaggccgccggtcaggttgacggtcaccggtgtttggtcgggaacggtgaggccggccgggaacaaggccaaggacgatgtggacagattgaaagtcgcgccgaacgggccggggatcgtgcccgggccgccgtagctgccgatgatgggtccattgatctgcaggtcgctgatgctgaggtagaacgacccggaggggaatttcgcgccgggtgggcctagcggcgggccgtagtggtcgatcgtgatgaacgggtccggcaagacgaccgggtccgcggtgatttctgccatggcggtttgcccgaaaagaacaaacgcgggattcacgtgaaaaccctcgaggccgacggttccggtcacgtggatcgggatcgcgggaatggtgatctccgggagagtgaattcgcggatcccgatgaatcccccggtgatttgtatgtcgaatgccggaatatcgatgggctggacgtggatgggaccgatcccgccaatcacctgcaggtcaatggggatttcggaaatggtgaaaagggtgccgggggtgaagggggccaggacgttgatgttgttgcccgttaagaagaaaccggtgttgtggcttcccgaattgaatacgcccaaattcccggtgccggagttgaagaacccgacattgccggtacccgaattgaacaatcccacattctcgctgcccgaattgaaaccaccgaacccagtcagattgtccccgctgagcccgataccgatattcccgttgccggtattggccaacccgatgttgccgatgcccatgttcgccaggccgaaattgctgctgccggcattgccgaacccgacgttgtcgaacccgatattgcccaatccgaagttgttgccgcccagcgcgccgcccgacaacatccccgacaactgagtacctacattgccgatacccgacatcaacgtgccggagttgaaatagcccgaaaccgttcccggcaacacctgcatggcctgggtggactggttaaaccagcccgaggtgtgcgcgccgacgttcccgaatcccgacaccccgccggcgccggtgttaaagaagcccgaggacggggcggtggtcgaattcccgaaccccggcgacgccggaacgttgccgcccacgatgtcgacgggcccgacgccgccgatggcgtgcaggttcagggggatgttgtcgatggtgattgccggggtgctcagggcgttgatgtggccaatcacgttgatcgccagcggaagtggttgctcgggaatcgagaatcccggaatggtgaaggcctcggtgcctgccgttacgccaagagtcagggtgagcggccccccggtgggaatgctgaggccaaccgggaaaagggtgagggctggggtggaataactgaaggttactgggatggaaaacccggtattgatatgtattgggccgatcaaggttgtgggaatgggggaagggctgagggcgacctgttggatttggggaattgttatggacgagacgggccaggccagcgtgatggtttggttgaagttttgtgccggccacagggtgatgggattgattttgatggggccgatcgaaatattgggtatgccgacgccgagcgagattgccgggacgttgatgggcgggacgaccaagggtccgaggtagagggtttcgttgatgttgatcgggatgtcgggaagtatgtggatgggctcgatagtgatggcgccgacaccaccgtttatgtccaggctgaggggaatgacaggaagaacgttcgctcccgaggagaagccgagcaggccctggtagtcgccccgccacaagacgccgttgctgtagttaccggagatgaaggcaccggtgttgacgtcgccggagttggccaccccggtgttgatgtcaccggtgttcaaccaacccgtgttgacactgcccgggttgaaaccgcccgtattggcctcccccgcgttgaaactgccggtgttgtagctacccgcattgaccacacccgtattgaacccacccgcgttgaacaaccccgtgctggcaatccccgaattaccgatcccggtgttatagctccccgaattgaacaccccccagttcccggtgccggagttaaagaaccccacattaccggtccccgaattaaacaacccca

SEQ ID NO: 2324 - DNA, 419 bp, Mycobacterium tuberculosis H37Rv
ccacattcccgctaccggtattgaaaccaccgaacccggtcagattatcaccggtcaacccaataccgaaattcccactgccggtgttagcgaacccaatattgcccacacccatattcgccaaaccgaaattgtagctgccggcattaccaaacccgatattacccagacccatcagacccggcgttaaccccgaattcccgagcccaaagttgccccacccgacattgcccaacccgacattgttgccaccgatattgccgccgcccacgttgtagctcccgacgttgccggcccccacgttgtagctgccgacgttgccgcttcccgcgttgaagaggccaacgttggccaaacccagattgacggcgagcgacttggccggctcggcggcggccgccaggcttgccagcggcgag

SEQ ID NO: 2325 - DNA, 633 bp, Mycobacterium tuberculosis H37Rv
cggcgacacccgcgttgccgccggccccgccagcaccgcccgcgccgttgaggccagtgcccccattaccgccggcaccaccggagccggcgttgccggtggtcgtgcttttgctgctaccgccgttaccgccagcgccaccggcccctccggcaccgcccgcgtcggtgccgataccgccattgccgcccgcgccgccggagccggcgtcaccgcccaaaccgacgttcccgccgtcgccgccgttgccgcccttgccgccggcgccgccgtcgccgcccgtggtgctgacgccgccgttgccgccggcgccgccgttgccgccgaggccgccattgccttcggggcctcccggaccgccgtagccgccgttgccgccggcgccgccaaacccagtctcggagacgccgccgttgccgccgaggccgccgttgccgcctaaggaaatgccgccaccgccgtcgccgccgctaccgccgttgccgcctgtgcgcccttccccgccgatgccgccctggccgccgaagccgccgaccccgccggcaccgccgtccccgccggcgccgccgacaccgccaacaccgctagcaaagtcgcccgcgccgccgggaccgccggcgccgcctgggccac

SEQ ID NO: 2326 - DNA, 434 bp, Mycobacterium tuberculosis H37Rv
ggatgtccggcacggcgaagccgtagttcgcttgtcccgtgaggcccaggtggatggggggaaggatcgtggtgtccgggatgataatggggccgatgccgccggttgaagtccagtggatcgggaattcgggaatcgtgatgccgacgttcaggccgaacaggccctcgaagttgcctcgccacaagatgccgttgctgaagttgcccgacatgagggcgccggtgtcgacattgcccgaattggcgacgccggtgttggcgttgccggtgttgaaccagccggtgttgatgctgcccgggttgaaaccaccggtgttggtgtcacccacattgaagctgcccgtgttgtacgacccagggttggccacaccggtattgaaattaccggcattgaaaagcccagtactgcccgttccgccattgccgatgccg

SEQ ID NO: 2327 - DNA, 1759 bp, Mycobacterium tuberculosis H37Rv
cgaagctgaccaaccgatagtcgccttcgctcgaccagtcggattcgccatgcccgcgcagatcgatcgtgaccgcttgccagccacgttcggcgacagcggctgcggcccgaccccatgagcgtcgcgtctgtccaccgccatgcaagaacaccacggcacgcgctcgcgggtctcccaagcggtcggcgacgatacggactgaaccgccccggcatgtccggagactccagttcttggaaaggatggggtcatgtcaggtggttcatcgaggaggtacccgccggagctgcgtgagcgggcggtgcggatggtcgcagagatccgcggtcagcacgattcggagtgggcagcgatcagtgaggtcgcccgtctacttggtgttggctgcgcggagacggtgcgtaagtgggtgcgccaggcgcaggtcgatgccggcgcacggcccgggaccacgaccgaagaatccgctgagctgaagcgcttgcggcgggacaacgccgaattgcgaagggcgaacgcgattttaaagaccgcgtcggctttcttcgcggccgagctcgaccggccagcacgctaattacccggttcatcgccgatcatcagggccaccgcgagggccccgatggtttgcggtggggtgtcgagtcgatctgcacacagctgaccgagctgggtgtgccgatcgccccatcgacctactacgaccacatcaaccgggagcccagccgccgcgagctgcgcgatggcgaactcaaggagcacatcagccgcgtccacgccgccaactacggtgtttacggtgcccgcaaagtgtggctaaccctgaaccgtgagggcatcgaggtggccagatgcaccgtcgaacggctgatgaccaaactcggcctgtccgggaccacccgcggcaaagcccgcaggaccacgatcgctgatccggccacagcccgtcccgccgatctcgtccagcgccgcttcggaccaccagcacctaaccggctgtgggtagcagacctcacctatgtgtcgacctgggcagggttcgcctacgtggcctttgtcaccgacgcctacgctcgcaggatcctgggctggcgggtcgcttccacgatggccacctccatggtcctcgacgcgatcgagcaagccatctggacccgccaacaagaaggcgtactcgacctgaaagacgttatccaccatacggataggggatctcagtacacatcgatccggttcagcgagcggctcgccgaggcaggcatccaaccgtcggtcggagcggtcggaagctcctatgacaatgcactagccgagacgatcaacggcctatacaagaccgagctgatcaaacccggcaagccctggcggtccatcgaggatgtcgagttggccaccgcgcgctgggtcgactggttcaaccatcgccgcctctaccagtactgcggcgacgtcccgccggtcgaactcgaggctgcctactacgctcaacgccagagaccagccgccggctgaggtctcagatcagagagtctccggactcaccggggcggttcagacaccgcccggcccgtggaccgagaacgattcagctgccattgatatcgggtccatcaggggatccagaaccatccgtttgcatgccctaccacgatcctgtcctaccgagcggcccgcagtcaccccagattcggcgtcaatccggcacccggttcgtggtccatccacggaacccaaggcgccattttcgcagtgattg

SEQ ID NO: 2328 - DNA, 410 bp, Mycobacterium tuberculosis H37Rv
caacggcggcagcaacaacggcaccggcgccggtggcaacggcggcaacggcggcaccggcggggtcggctcggttggcgcggctggtggcgatggcggcaacggcggcaccggcggcttcgccggtttcggcggcaccgcaggcaatggcggttccggcggcacgggcggggccggcggcgacggcggcaccggcggggacggcggcaacggcgttatcgccggcggcggggggaccggcggcaacggcggcgccagcggggccggcggcgccggcggcacgggcgggttcgccggcaacggcaatgccggcggcaatggcggcaccggcggcgcgagcgaggacggcgacaacggcaacgctggcagcggcgccaccggcggtaccggcggcaacggcggcaccggcg

SEQ ID NO: 2329 - DNA, 402 bp, Mycobacterium tuberculosis H37Rv
gcgccggcacggatgcgaccgctaccggtgccaccggcggcaccgggttttccggtggagccggcggggccggcggggccggcggcaacaccggggttggcggcaccaacggctccggcgggcaaggcggcaccggcggcgcgggcggcgccggtggtgctggcggtgtcggcgccgacaaccccaccggcatcggcggcaccggcggcaccggcgggaaaggcggcgccggcggggccggcgggcagggcggtagcagcggtgccggcggcaccaacggctctggtggcgctggcggcaccggcggacaaggcggcgccgggggcgctggcggggccggcgccgataaccccaccggcatcggcggcgccggcggcaccggcggcaccggcggagcggccg

SEQ ID NO: 2330 - DNA, 1461 bp, Mycobacterium tuberculosis H37Rv
gccggcggcacaggtggcgcggccggcgccggcggggccggcggggcgaccggtaccggcggcaccggcggcgttgtcggcgccaccggtagtgcaggcatcggcggggccggcggccgcggcggtgacggcggcgatggggccagcggtctcggcctgggcctctccggctttgacggcggccaaggcggccaaggcggggccggcggcagcgccggcgccggcggcatcaacggggccggcggggccggcggcaacggcggcgacggcggggacggcgcaaccggtgccgcaggtctcggcgacaacggcggggtcggcggtgacggtggggccggtggcgccgccggcaacggcggcaacgcgggcgtcggcctgacagccaaggccggcgacggcggcgccgcgggcaatggcggcaacgggggcgccggcggtgctggcggggccggcgacaacaatttcaacggcggccagggtggtgccggcggccaaggcggccaaggcggcctgggcggggcaagcaccacctcgatcaacgccaacggcggcgccggcggcaacggcggcaccggcggcaaaggcggcgccggtggtgcgggaaccctgggcgtcggcggctccggcggcaccggcggggacggcggcgatgcgggctctggtggtggcggcggcttcggcggggccgcgggtaaggccggcggcggcggaaacggcggccgcggcggtgacggcggcgatggggccagcggtctcggcctgggcctctccggctttgacggcggccaaggcggccaaggcggggccggcggcagcgccggcgccggcggcatcaacggggccggcggggccggcggcaacggcggcgacggcggggacggcgcaaccggtgccgcaggtctcggcgacaacggcggggtcggcggtgacggtggggccggtggcgccgccggcaacggcggcaacgcgggcgtcggcctgacagccaaggccggcgacggcggcgccgcgggcaatggcggcaacgggggcgccggcggtgctggcggggccggcgacaacaatttcaacggcggccagggtggtgccggcggccaaggcggccaaggcggcctgggcggggcaagcaccacctcgatcaacgccaacggcggcgccggcggcaacggcggcaccggcggcaaaggcggcgccggtggtgcgggaaccctgggcgtcggcggctccggcggcaccggcggggacggcggcgatgcgggctctggtggtggcggcggcttcggcggggccgcgggtaaggccggcggcggcggaaacggcggtgttggcggtgacggcggcgagggagccagcggtctcggcctgggcctctccggctttgacggcggccaaggcggccaaggcggggccggcggcagcgccggcgccggcggcatcaacggggccggcggggccggcggc

SEQ ID NO: 2331 - DNA, 502 bp, Mycobacterium tuberculosis H37Rv
cggcgccggcggcaacggcggcaccggcggcaaaggcggcgccggtggtgcgggaaccctgggcgtcggcggctccggcggcaccggcggggacggcggcgatgcgggctctggtggtggcggcggcttcggcggggccgcgggtaaggccggcggcggcggaaacggcggtgttggcggtgacggcggcgagggagccagcggtctcggcctgggcctctccggctttgacggcggccaaggcggccaaggcggggccggcggcagcgccggcgccggcggcatcaacggggccggcggggccggcggcaccggcggggccggtggtgacggcgccccggcgaccctgatcggcggacccgacggcggtgacggcggccaaggcggcatcggcggggacggcggcaacgccggattcggcgccggtgttcccggcgacggcggggacggcggcaacgccggattcggcgccggtgttcccggcgacggcgggatcggcggc

SEQ ID NO: 2332 - DNA, 1778 bp, Mycobacterium tuberculosis H37Rv
gacggcgccccggcgaccctgatcggcggacccgacggcggtgacggcggccaaggcggcatcggcggggacggcggcaacgccggattcggcgccggtgttcccggcgacggcggggacggcggcaacgccggattcggcgccggtgttcccggcgacggcgggatcggcggcaccggcggggccgggggcgccggcggcgccggcgccgacggggaccccagcattgacggcggccaaggtggtgccggcggccacggcggccaaggcggcaaaggcggcctgaacagcaccgggctagccagcgccgccagcggtgacggcggcaacggcggggccggcggggccggcggcaacggcggcgacggcgacggctttatcggcgggtccggcggcaccggcgggaccggcggcgacgccggcgtcggcggcctggccaacaccggcggaaccgcgggcaacgccggtatcggcggggccggcggccgcggcggcgacggcggggccggcgacagcggcgccctctcccaagacggcaacggcttcgccggcggccaaggcggccaaggcggggtcggcggcaacgccggcgccggcggcatcaacggggccggcggcaccggcggcaccggcggggccggtggtgacggccagaacggaacgacaggcgtggcgagcgagggcggcgccggcggccaaggcggtgacggcggccaaggcggcatcggcggggccggcggcaacgccggattcggcgccggtgttcccggcgacggcgggatcggcggcaccggcggggccgggggcgccggcggcgccggcgccgacggggaccccagcattgacggcggccaaggtggtgccggcggccacggcggccaaggcggcaaaggcggcctgaacagcaccgggctagccagcgccgccagcggtgacggcggcaacggcggggccggcggggccggcggcaacggcggcgacggcgacggctttatcggcgggtccggcggcaccggcgggaccggcggcgacgccggcgtcggcggcctggccaacaccggcggaaccgcgggcaacgccggtatcggcggggccggcggccgcggcggcgacggcggggccggcgacagcggcgccctctcccaagacggcaacggcttcgccggcggccaaggcggccaaggcggggtcggcggcaacgccggcgccggcggcatcaacggggccggcggcaccggcggcaccggcggggccggtggtgacggccagaacggaacgacaggcgtggcgagcgagggcggcgccggcggccaaggcggtgacggcggccaaggcggcatcggcggggccggcggcaacgccggattcggcgccggtgttcccggcgacggcgggatcggcggcaccggcggggccgggggcgccggcggcgccggcgccgacggggaccccagcattgacggcggccaaggtggtgccggcggccacggcggccaaggcggcaaaggcggcctgaacagcaccgggctagccagcgccgccagcggtgacggcggcaacggcggggccggcggggccggcggcaacggcggagccggcgggctcggcgggggcggtggcacaggcggcaccaacggcaacggcggcctcggcggaggcggcggcaacggcggagccggcggtgccgggggaacgcccaccggcagtggcaccgaggggaccggcggcgacggtggagatgccggcgccggcggcaacggcggctctgccaccggcgt

SEQ ID NO: 2333 - DNA, 591 bp, Mycobacterium tuberculosis H37Rv
aaggcggcaccggcggcaccggcggcaacgccggcgccggcggcaccggcttcacccaaggcgccgacggcaacgccggcaacggcggtgacggcggggtcggcggcaacggcggaaacggcgcagacaacaccaccaccgccgccgccggcaccacaggcggggccggcggggccggcggggccggcggaaccggcggagccgccggcaccggcaccggcggccaacaaggcaacggcggcaacggcggcaacggcggcaccggcggcaaaggcggcaccggcggggccggcatgaacagcctcgacccgctgctagccgcccaagacggcggccaaggcggcaccggcggcaccggcggcaacgccggcgccggcggcaccggcttcaccccaaggcgccgacggcaacgccggcaacggcggtgacggcggggtcggcggcaacggcggaaacggcgcagacaacaccaccaccgccgccgccggcaccacaggcggggccggcggggccggcggggccggcggaaccggcggaaccggcggagccgccggcaccggcaccggcggccaacaaggcaacggcggcaac

SEQ ID NO: 2334 - DNA, 435 bp, Mycobacterium tuberculosis H37Rv
tcccggcggcaacggcgggcaaggaggtcaaggcggcagcggtggtgccggtggggcggccggggctggcggcgccggtggcggcgctaacggcaccgctggcaacggcggccaaggcggtgccggcggcaccggcggcgccggcgcagcctcctcagctaccaacggcggcagcggcggcgccggcggcaccggaggcgacggcggcagcggcggcgccggcggcaccggaggcgccggcggcaccggcggggcggccggcgacggcggacaaggtggccagggcggcgccggcggcggtgccggtggtcaaggtggtgccggcggtgccggcgggaccggcggcaacggcggcaatatcaccggcggcaccgcgggcaccgcgggggccgccggtaacggcggcgccgccggaaagggtggcgccggcggcca

SEQ ID NO: 2335 - DNA, 1013 bp, Mycobacterium tuberculosis H37Rv
gccgccgccgctgagcagatcgtgctgggcgtgatcaatgcgcccacccaggcgctgctggggcgcccgttgatcggtgacggcgccaatgcgacgactcccggcggggccggcggggccggcggtctgctgttcggcaacggcggggccggggcagccggggcgcccggccaggccggcgggcctggcgggcccgccggattgtggggcaacggcgggcccggcggggccggcggcagcggtgggggcaccggcggtgccggcggcgccggtgggtggctgttcggggttggcggcgccggcggtgtcggtggggccggtggcggcaccggcggggcgggtgggcccggtggtttgatctggggcggcggcggggccggcggtgtcggtggggccggtggcggcaccggcggggccggcggccgcgccgagctgctgttcggcgccggcggtgcgggtggggcgggcaccgacggcgggcccggtgctaccggcgggaccggcggacacggcggagtcggcggcgacggcggatggctggcacccggcggggccggcggggccggcgggcaaggcggggcaggtggtgccggcagcgatggtggcgcgttgggtggtaccggcgggacgggcggtaccggcggcgccggtggcgccggcggtcgcggcgcactgctgctgggcgctggcggacagggcggcctcggcggcgccggcggacaaggcggcaccggcggggccggcggagatggcgttctggggggtgtcggtggcactggtggtaagggcggtgtcggcggcgtggctggcctcggcggggccggtggtgccgcgggccagctcttcagcgccagcggagcggccggtaacgccggtgtcggcggggccggcggccaaggcggtgacggcggagccggcggggccggcgccgacgccgaccagcccggcgccaccggcggcaccgggttcgccggtggagccggcggagccggcggggccggcggtagcagcgg

SEQ ID NO: 2336 - DNA, 668 bp, Mycobacterium tuberculosis H37Rv
gccagcggagcggccggtaacgccggtgtcggcggggccggcggccaaggcggtgacggcggagccggcggggccggcgccgacgccgaccagcccggcgccaccggcggcaccgggttcgccggtggagccggcggagccggcggggccggcggtagcagcggtgccggcggcaccaacggctccggcggcgccggcggacaaggcggcgccgggggtgctggcggggccggcgccgataaccccaccggcatcggcggcaccggcggtgacggcggcaccggcggagccgccggagccggcggggccggcggagcggccggcaccggaggcaccggcggcatgatcggcaccacaggcaacgccggtgtcggcggggccggcggccaaggcggtgacggcggagccggcggggccggcgccgacgccgaccagcccggcgccaccggcggcaccgggttcgccggtggagccggcggggccggcggggccggcggtagcagcggtgccggcggcaccaacggctccggcggcgccggcggcaccggcggacaaggcggcgccgggggtgctggcggggccggcgccgataaccccaccggcatcggcggcaccggcggtgacggcggcaccggcggagcggccggagccggcggggccggcggagc

SEQ ID NO: 2337 - DNA, 1804 bp, Mycobacterium tuberculosis H37Rv
cggccggagccggcggggccggcggagcggccggcaccggaggcaccggcggcatgatcggcaccacaggcaacgccggtgtcggcggggccggcggccaaggcggtgacggcggagccggcggggccggcgccgacgccgaccagcccggcgccaccggcggcaccgggttcgccggtggagccggcggggccggcgggtccggcggtagcagctgtgccggcggcaccaacggctccggcggcgccggcggcacctgcggacaagtcgtcgccgggggtgctggcatcagcttcagcaacggcagcaacggcggcaccggcggcaccgggggcgtgggcggcaccgggggcgacggcggcaacgcaggcaccggcgccggcgaccccggcaaaggcggcaccggcggcaccggcggcaccggcggcagcggcggggccggcggtagcggcggggccaacttcaacggcggcaccggcggcaccggcggcaccggcggcaaaggcggcctaaacaccgacggactcagcagcgccaccagcggcaccggcggcaccggcggcaccggcggcaaaggcggcaccggcggggccggcgacgactccgccggcgggaccggcggcacaggcggggccggcggcaacgccggcgccggcggcctagccaacaccggcggcaccgcaggcaacgcgggcatcggcggtgacggcggccaaggcggtaacggcggccaaggagacagcggttccggattgggcggccagcccggctttgccggcggggccggcggcaaaggcggggccggcggtagcagcggtgccggcggcaccaacggctccggcggcgccggcggggccggcggacaaggcggcgccgggggtgctggcatcagcttcagcaacggcagcaacggcggcaccggcggcaccgggggcgtgggcggcaccgggggcgacggcggcaacgcaggcaccggcgccggcgaccccggcaaaggcggcaccggcggcaccggcggcaccggcggcagcggcggggccggcggtagcggcggggccaacttcaacggcggcaccggcggcaccggcggcaccggcggcaccggcggcaaaggcggcatgggcggcatcgctggcgacggcgggcccggcggtgacggcggcaacgccggggtcggaggaaaaggcggcaccaacggcaacggcggcagcggcgggaccggcggcacaggcggggccggcggcaacgccggcgccggcggcctagccaacaccggcggcaccgcaggcaacgcgggcatcggcggtgacggcggccaaggcggtaacggcggccaaggagacagcggttccggattgggcggccagcccggctttgccggcggccccggcggcaaaggcggggccggcggcaacgccggcaccggcggcaccaacggctccggcgccggcggggccggcggacaaggcggcgccgggggtgctggcatcagcttcagcaacggcagcaacggcggcaccggcggcaccgggggcgtgggcggcaccgggggcgacggcggcaacgcaggcaccggcgccggcgaccccggcaaaggcggcaccggcggcaccggcggcaccggcggcagcggcggggccggcggtagcggcggggccaacttcaacggcggcaccggcggcaccggcggcaccggcggcaccggcggcaaaggcggcatgggcggcatcgctggcgacggcgggcccggcggtgacggcggcaacgccggggtcggaggaaaaggcggcaccaacggcaacgg

SEQ ID NO: 2338 - DNA, 1567 bp, Mycobacterium tuberculosis H37Rv
cgcccaacggactccttgccagcggtcccggcaaaccccaacacgccggcaccccgatccgaagccagcaccgacgccgacgtgcccgcgggagctggcgccaccgccgacaccagcctggcctccggtcgcaccgcggcagactcacgcaacggcggcgccgctgcaggtcgtacggcaacgggcgccacgtccgccgtctttaggcccacttcgatagcctgcgcgtccgcactcgccaggtccgcgaggtactggccaacgccgataggcaccgcagtcgacaacgaagtcgacaacgaggtcggcaccgcaatcacggagccggtgagcacaaatggcgatgcgatcacaaggagcggcgggccgaagatgatcgccaggaccgcaaagacgatcgcgtatgcgaagatcacgagcggcaagatgagcacgatgatgatcgtgtatgcgacgattgcaaacaggatctcgagcgatatcagaaagagctgaatcaatatctcgatgatgatcccgatgatgctggcggggtccaacgttgcggcggagatcgccggcagggcgctggcaacgccagcaccgccgttgaacagtaccggagccggtgtggtttgcggtgccgacgccagcgccgcatcggaggtgccctcatagatactcatcgtggtggccgcctgaatccacatccgcgcatagtcggcctcattgagcgcgatcgggatcgtattgattccaaagaaattcgttcccagcaacaccgcatggctggtgtgattagcggccaactcggtcagcgtcggcatcgccgccagcgcgctggcatatgccgtggtcataacctcatgctgggtggccagccgcgcactgtcggcactggatttagttagctaggctagataaggtaggtgggcggccacataagcttcggcgctcggaccctcccacgccccgccctgtaccgctgccagcaccgcagtgagctcttgggctgccgaagcatactccgcactcagcgatgtccattccgcggcagccgcctgcaacgaagccgggcccggaccggcgctgagcaacgccgaatgcacctccggcggcgaggcaaaccagatgggcgccgtcatagtgagccccctgaaaccgaatccaccgccggcgacagcgcggccgccgccaaaccatcaggaactaccccctgcgtcactcctcgtactccttcggtcatctcaccgaccaaccgcagccgaaagccggtcagtcaactgactgggccaagtcgcacacatgacggactatagatctcacgcaatatagcgataatcgatcatttccacgagctacgatgctcgagttgcccagccagcaagatacgtccctttacaccaggcagataaactgggctggctttggtcaaacccagcgcgacccgcagcacttcctcatagcccgaccgcgcgctccagttccttcaacgaggtctccagatggctgagtacccgctgcacgtgtggaacgctgcggcggcaacccacgactccgaagtcgagactatcggcggtgctggtca

SEQ ID NO: 2339 - DNA, 412 bp, Mycobacterium tuberculosis H37Rv
cggtgtgcgagttgatgcggatcgcctggcgcaccgtcggggcgatcgtggcccgggtctgggccgacaccgaaaagcgcattgaccggttcgcgaacttgcgccgcatcggtatcgatgagatctcctacaagcgccaccaccggtacctgacggtggtcgtcgatcacgacagcggccggttggtgtgggccgccccgggccacgacaaggccaccctgggcttgttcttcgatgccctgggcgctgagcgggccgcccagattactcacgtttcggccgatgccgcggactggatcgctgacgtggtcaccgagcgctgcccggatgcgattcaatgcgccgatccgtttcatgtggtggcctgggccaccgaggcgctcgacgtcgagcggcgccgagcctggaacga

SEQ ID NO: 2340 - DNA, 467 bp, Mycobacterium tuberculosis H37Rv
gccatcgacgccgccctcgaccacggcctatcccaaggcctgatcgaatccaccaacaccaagatccgcctactgacccggatcgcgttcggattccgctcaccacaagccctcatcgccctagccatgctcaccctcgccggccaccgccccaccctgccaggccgacacaaccacccacagatcagtcagtagagcccaattcgtaccgaatttgggggcttttacgtctgctcgcgctacccagctagaccgggatcaggccgtgcttgcggcccacccgccaccacagctgcttgtcccgcagcaggtgcatcgacttgcgcaacagcagccgggtctcatgcgggtcgatgacggcatcgatgaacccgcgctcggcggcgatccacgggatcgccatgttgaggttgtatggcctgggccaccgaggcgctcgacgtcgagcggcgccgagcctggaacga

SEQ ID NO: 2341 - DNA, 400 bp, Mycobacterium tuberculosis H37Rv; identical to SEQ ID NO: 1889

SEQ ID NO: 2342 - DNA, 400 bp, Mycobacterium tuberculosis H37Rv; identical to SEQ ID NO: 1891

SEQ ID NO: 2343 - DNA, 401 bp, Mycobacterium tuberculosis H37Rv; identical to SEQ ID NO: 1899

SEQ ID NO: 2344 - DNA, 456 bp, Mycobacterium tuberculosis H37Rv; identical to SEQ ID NO: 2316

SEQ ID NO: 2345 - DNA, 401 bp, Mycobacterium tuberculosis H37Rv; identical to SEQ ID NO: 2300

SEQ ID NO: 2346 - DNA, 506 bp, Mycobacterium tuberculosis H37Rv; identical to SEQ ID NO: 2312

SEQ ID NO: 2347 - DNA, 881 bp, Mycobacterium tuberculosis H37Rv; identical to SEQ ID NO: 2317

SEQ ID NO: 2348 - DNA, 430 bp, Mycobacterium tuberculosis H37Rv; identical to SEQ ID NO: 2318

SEQ ID NO: 2349 - DNA, 457 bp, Mycobacterium tuberculosis H37Rv; identical to SEQ ID NO: 2319

SEQ ID NO: 2350 - DNA, 1759 bp, Mycobacterium tuberculosis H37Rv; identical to SEQ ID NO: 2327

SEQ ID NO: 2351 - DNA, 415 bp, Mycobacterium tuberculosis H37Rv
gccatcgacgccgccctcgaccacggcctatcccaaggcctgatcgaatccaccaacaccaagatccgcctactgacccggatcgcgttcggattccgctcaccacaagccctcatcgccctagccatgctcaccctcgccggccaccgccccaccctgccaggccgacacaaccacccacagatcagtcagtagagcccaattcgtaccgaatttgggggcttttacgtctgctcgcgctacccagctagaccgggatcaggccgtgcttgcggcccacccgccaccacagctgcttgtcccgcagcaggtgcatcgacttgcgcaacagcagccgggtctcatgcgggtcgatgacggcatcgatgaacccgcgctcggcggcgatccacgggatcgccatgttgaggttgta

1-26. (canceled)

27. A nucleotide sequence having a sequence selected from the group consisting of SEQ ID NOs: 1 to 2531.

28. A method for diagnosis; identification of strains; typing of strains; and/or giving orientation to potential degree of virulence, infectivity and/or latency of all strains of Mycobactenra wherein said method utilizes a nucleotide sequence selected from sequences having SEQ ID NOs: 1 to 2531.

29. The nucleotide sequence as claimed in claim 27 wherein the sequence is a single nucleotide polymorphism having SEQ ID NOs: 1 to 1829.

30. The nucleotide sequence as claimed in claim 27 wherein the sequence is an insertion/deletion (indel) having SEQ ID NOs:1830 to 2286.

31. The nucleotide sequence as claimed in claim 27 wherein the sequence is a region of long polymorphism having a sequence selected from SEQ ID NOs: 2287 to 2531.

32. Primer sequences for amplifying the region around a polymorphism of SEQ ID NOs:1 to 2531.

33. A nucleotide sequence flanking a polymorphism of SEQ ID NOs:1 to 2531 wherein said sequence has a length up to 35 nucleotides.

34. A method for drug design; drug development; gene therapy; and/or vaccine development, wherein said method utilizes a nucleotide sequence having a sequence selected from SEQ ID NOs:1 to 2531 as a target.

35. The method, according to claim 34, wherein said method utilizes a sequence encompassing a single nucleotide polymorphism having a sequence selected from SEQ ID NOs:1 to 1829.

36. The method, according to claim 34, wherein said method utilizes a sequence encompassing insertion/deletion (indel) having a sequence selected from SEQ ID NOs:1830 to 2286.

37. The method, according to claim 34, wherein said method utilizes a region of long polymorphism having a sequence selected from SEQ ID NOs:2287 to 2581.

38. A method for drug design using bioinformatics and/or for development of drugs effective against infectious diseases including tuberculosis wherein said method utilizes a protein, RNA, DNA or metabolite encoded by a region having a sequence selected from SEQ ID NOs: 1 to 2531.

39. A method for vaccine development against infectious diseases including tuberculosis wherein said method utilizes a protein, RNA, DNA or metabolite encoded by the region having a sequence selected from SEQ ID NOs: 1 to 2531.

40. Use of a protein, RNA, DNA and/or metabolite encoded by the region carrying the polymorphisms having a sequence selected from SEQ ID NOs: 1 to 2531 for RNAi technology and antisense technologies.

41. A method for generating and developing a database for identification and selection of polymorphisms, wherein said method utilizes sequences selected from SEQ ID NOs:1 to 2531.

42. The method as claimed in claim 41 wherein said database is generated using the algorithms as herein described.

43. Use of the database as claimed in claim 41, for identification of the polymorphisms across organisms.

44. A diagnostic kit for diagnosis, identification of the strain, typing of the strain and giving orientation to its potential degree of virulence, infectivity and/or latency of all infectious diseases wherein said kit comprise at least one polynucleotide sequence having a sequence selected from SEQ ID NOs: 1 to 2531.

45. The diagnostic kit as claimed in 44 for diagnosis, identification of the strain, typing of the strain and giving orientation to its potential degree of virulence, infectivity and/or latency of all strain of Mycobacteria having SEQ ID NOs: 1 to 2531.

46. The diagnostic kit as claimed in 18 wherein the said sequence is a single nucleotide polymorphism having SEQ ID NOs: 1to 1829.

47. The diagnostic kit as claimed in 44 wherein the said sequence is an insertion/deletion (indel) having SEQ ID NOs: 1830 to 2286.

48. The diagnostic kit as claimed in 44 wherein the said sequence are regions of long polymorphism having a SEQ ID NOs: 2287 to 2531.

49. An assay for the identification of strains for infectious diseases including mycobacterium wherein said method utilizes a nucleotide sequences having a SEQ ID NOs: 1 to 2531 as a probe in an assay.

50. The method as claimed in claim 49 wherein the sequence is a single nucleotide polymorphism having SEQ ID NOs:1 to 1829.

51. The method as claimed in claim 49 wherein the sequence is an insertion/deletion (indel) having SEQ ID NOs:1830 to 2286.

52. The method as claimed in claim 50 wherein the sequence is a region of long polymorphism having a SEQ ID NOs:2287 to 2531.
